(19) United States
(12) Patent Application Publication
(10) Pub. No.: US 2014/0296137 A1
(43) Pub. Date: Oct. 2, 2014

(54) METHODS AND COMPOSITIONS FOR CONTROLLING ROTIFERS

(71) Applicant: Los Alamos National Security, LLC, Los Alamos, NM (US)

(72) Inventors: Sathish Rajamani, Los Alamos, NM (US); Richard T. Sayre, Los Alamos, NM (US)

(21) Appl. No.: 14/231,139

(22) Filed: Mar. 31, 2014

Related U.S. Application Data
(60) Provisional application No. 61/807,126, filed on Apr. 1, 2013.

(51) Int. Cl. A01N 43/50; A01N 43/36; A01N 43/38

(52) U.S. Cl. CPC A01N 43/50; A01N 43/38; A01N 43/36
USPC 514/4.5; 514/4.6; 435/257.2; 435/320.1

(57) ABSTRACT

Described herein are compositions and methods for controlling, inhibiting, reducing and/or preventing rotifer growth with antimicrobial peptides. Methods for removing and/or preventing rotifer infestations in algae cultivations by controlling, inhibiting, reducing and/or preventing rotifer growth with an antimicrobial peptide (AMP) are further provided. Also described are transgenic algae comprising an expression vector comprising a nucleic acid sequence encoding an AMP. In some instances, the nucleic acid sequence encoding the AMP is codon-optimized for expression in algae.

### CROSS REFERENCE TO RELATED APPLICATION

[0001] This application claims the benefit of U.S. Provisional Application No. 61/807,126, filed Apr. 1, 2013, which is herein incorporated by reference in its entirety.

### ACKNOWLEDGMENT OF GOVERNMENT SUPPORT

[0002] This invention was made with government support under Contract No. DE-AC52-06NA25396 awarded by the U.S. Department of Energy. The government has certain rights in the invention.

### FIELD

[0003] The present disclosure relates generally to compositions and methods for controlling, inhibiting, reducing and/or preventing rotifer growth using peptides. The disclosure further relates to compositions and methods for removing and/or preventing rotifer infestations in algae cultivations by controlling, inhibiting, reducing and/or preventing rotifer growth with an antimicrobial peptide (AMP).

### BACKGROUND

[0004] The booming global population, combined with rising industrialization and modernization generates increasing demands for energy, most of which comes from fossil fuels. Increasing greenhouse gas (GHG) emissions are accelerating climate change at a pace that has global environmental and security implications. To mitigate domestic energy demands and their environmental impacts, it is necessary to seek alternative energy sources that reduce or ameliorate carbon emissions. The potential for reductions in GHG emissions (environment), reduced fuel prices (economics), and reduction in dependency on foreign oil (national security) have driven increased scientific, public, political and commercial interests in biofuels. However, a number of limitations impede the advancement and scale-up of current biomass/biofuel production systems, including biocontamination, which has a major impact on algal crop yields, particularly in open pond systems.

[0005] Beyond bacteria, virus, fungi and protozoans that potentially cause harm to algal crops, there are other biocontaminants or ‘predators’ that effect algal crop yield in open ponds. One such organism is a small multicellular invertebrate organism called a rotifer. Rotifers are microscopic aquatic organisms found largely in freshwater ponds and in some marine environments. They can also be found in moist soil, on mosses and lichens growing on tree trunks and rocks, in rain gutters and puddles, in soil or leaf litter, on mushrooms growing near dead trees, in tanks of sewage treatment plants, and even on freshwater crustaceans and aquatic insect larvae. Their ubiquitous existence provides them easy access to algal cultivation ponds through rainwater runoff or even by wind gusts that can carry them to the ponds. They are highly adapted, hardy organisms that can withstand seasonal variations in ponds ranging from cold winters to hot summers (Sahuquillo and Miracle, Limnetica 29(1): 75-92, 2010). They have the ability to acquire genetic materials from their environment through horizontal gene transfer. Indeed, the genetic heterogeneity and complexity of these organisms was well established in a sequencing study (Gladyshev et al., Science, 320(5880):1210-1213, 2008).

[0006] Generally omnivorous, rotifers feed on dead and decaying matter and on unicellular green algae. Given the abundance of algae in open algal ponds, once rotifers enter these ponds, they seem to readily thrive by feeding upon algae and multiplying in great numbers, causing large algal biomass loss. To alleviate rotifer infestation, ponds must be drained and decontaminated with abrasive agents such as hypochlorite or other caustic agents before reestablishing open pond algal cultivation. This procedure results in large and crippling economic losses and could greatly jeopardize the reliable yields of algal crop for fuel production.

[0007] Therefore, there continues to be a need for compositions and methods to control and/or prevent rotifer contaminations in algae cultivations in order to improve biomass production systems, particularly large-scale systems.

### SUMMARY

[0008] The present disclosure meets such needs by identifying and utilizing peptides to control, inhibit, reduce and/or prevent rotifer infestations without causing harm to the algae.

[0009] The present disclosure describes compositions and methods for removing and/or inhibiting and/or preventing rotifer infestations in algae cultivations by controlling, inhibiting, reducing and/or preventing rotifer growth with an antimicrobial peptide (AMP).

[0010] In one aspect, the disclosure provides a method for inhibiting the growth or inhibiting the growth rate of one or more rotifers comprising contacting one or more rotifers with an isolated antimicrobial peptide (AMP), wherein the growth or growth rate of the one or more rotifers is inhibited by the AMP compared to the growth or growth rate of the one or more rotifers absent the AMP.

[0011] In another aspect, the AMP is from about 5 to about 200 amino acids in length. In another aspect, the AMP is from about 5 to about 600 amino acids in length. In a related aspect, the AMP is an insecticidal AMP or a non-insecticidal AMP. In a related aspect, the concentration of the AMP is from about 0.5 μM to about 500 μM (or from about 0.5, 1, 2, 3, 4, 5, 6, 7, 8, 9, 10, 11, 12, 13, 14, 15, 16, 17, 18, 19, 20, 21, 22, 23, 24, 25, 26, 27, 28, 29, 30, 31, 32, 33, 34, 35, 36, 37, 38, 39, 40, 41, 42, 43, 44, 45, 46, 47, 48, 49 or 50, 60, 70, 80, 90, 100, 110, 120, 130, 140, 150, 160, 170, 180, 190, 200, 210, 220, 230, 240, 250, 260, 270, 280, 290, 300, 310, 320, 330, 340, 350, 360, 370, 380, 390, 400, 410, 420, 430, 440, 450, 460, 470, 480, 490 or 500 μM) or from about 75 μM to about 370 μM (or from about 75, 85, 95, 105, 115, 125, 135, 145, 155, 165, 175, 185, 195, 205, 215, 225, 235, 245, 255, 265, 275, 285, 295, 305, 315, 325, 335, 345, 355, 365 or 370 μM).

[0012] In another aspect, the AMP comprises the amino acid sequence of any one of SEQ ID NOs: 1-1647. In a related aspect, the AMP comprises the amino acid sequence of any one of SEQ ID NOs: 32, 36, 62, 64, 122, 144, 232, 234, 235, 240, 241, 243-246, 248, 802, 803 and 1638-1647. In yet another related aspect, the AMP comprises the amino acid sequence of any one of SEQ ID NOs: 32, 36, 62, 64, 122, 232, 235, 246, 803 and 1637.

[0013] In another aspect, the one or more rotifers are Bdelloid rotifers, Monogononta rotifers or a combination thereof. In a related aspect, the one or more rotifers are of the species Adineta vaga, Philodina acuticornis, Brachionus or any combination thereof.

[0014] In another aspect, the disclosure provides for a method for inhibiting or preventing a rotifer infestation of an algae culture comprising contacting an algae culture with an isolated antimicrobial peptide (AMP), wherein the concentration of the AMP in the algae culture is sufficient to inhibit the growth of and/or reduce the rate of growth of the rotifer in the algae culture.

[0015] In a related aspect, the AMP does not substantially inhibit the growth of the algae. In the context of the present disclosure, “does not substantially inhibit” means inhibits less than 10%, such as less than 9%, less than 8%, less than 7%, less than 6% or less than 5%.

[0016] In another aspect, the AMP is from about 5 to about 200 amino acids in length. In another aspect, the AMP is from about 5 to about 600 amino acids in length. In a related aspect, the AMP is an insecticidal AMP or a non-insecticidal AMP. In a related aspect, the concentration of the AMP in the algae culture is from about 0.5 μM to about 500 μM or from about 75 μM to about 370 μM.

[0017] In another aspect, the AMP comprises the amino acid sequence of any one of SEQ ID NOs: 1-1647. In a related aspect, the AMP comprises the amino acid sequence of any one of SEQ ID NOs: 32, 36, 62, 64, 122, 144, 232, 234, 235, 240, 241, 243-246, 248, 802, 803 and 1638-1647. In yet another related aspect, the AMP comprises the amino acid sequence of any one of SEQ ID NOs: 32, 36, 62, 64, 122, 232, 235, 246, 803 and 1637.

[0018] In another aspect, the rotifers are Bdelloid rotifers, Monogononta rotifers or a combination thereof. In a related aspect, the rotifers are of the species Adineta vaga, Philodina acuticornis, Brachionus or any combination thereof.

[0019] In another aspect, the disclosure provides for a composition comprising a rotifer and an antimicrobial peptide (AMP). In a related aspect, the growth of the rotifer is inhibited by the AMP compared to the growth of the rotifer absent the AMP. In yet another related aspect, the growth rate of the rotifer is reduced by the presence of the AMP compared to the growth rate of the rotifer absent the AMP.

[0020] In another aspect, the composition further comprises algae. In a related aspect, the AMP does not substantially inhibit the growth of the algae. In another aspect, the AMP is from about 5 to about 200 amino acids in length. In another aspect, the AMP is from about 5 to about 600 amino acids in length. In a related aspect, the AMP is an insecticidal AMP or a non-insecticidal AMP. In a related aspect, the concentration of the AMP is from about 0.5 μM to about 500 μM or from about 75 μM to about 370 μM.

[0021] In another aspect, the AMP comprises the amino acid sequence of any one of SEQ ID NOs: 1-1647. In a related aspect, the AMP comprises the amino acid sequence of any one of SEQ ID NOs: 32, 36, 62, 64, 122, 144, 232, 234, 235, 240, 241, 243-246, 248, 802, 803 and 1638-1647. In yet another related aspect, the AMP comprises the amino acid sequence of any one of SEQ ID NOs: 32, 36, 62, 64, 122, 232, 235, 246, 803 and 1637.

[0022] In another aspect, the rotifer is a Bdelloid rotifers or a Monogononta rotifer. In a related aspect, the rotifer is of the species Adineta vaga, Philodina acuticornis, or Brachionus.

[0023] In another aspect, the disclosure provides for a composition comprising a transgenic algae and a rotifer, wherein the transgenic algae comprises an expression vector comprising a promoter (such as a heterologous promoter) operatively linked to a nucleotide sequence encoding an antimicrobial peptide (AMP).

[0024] In another aspect, the growth of the rotifer is inhibited by the AMP compared to the growth of the rotifer absent the AMP. In a related aspect, the growth rate of the rotifer is reduced by the presence of the AMP compared to the growth rate of the rotifer absent the AMP.

[0025] In another aspect, the AMP does not substantially inhibit the growth of the algae.

[0026] In another aspect, the AMP is from about 5 to about 200 amino acids in length. In another aspect, the AMP is from about 5 to about 600 amino acids in length. In a related aspect, the AMP is an insecticidal AMP or a non-insecticidal AMP. In another aspect, the AMP comprises the amino acid sequence of any one of SEQ ID NOs: 1-1647. In a related aspect, the AMP comprises the amino acid sequence of any one of SEQ ID NOs: 32, 36, 62, 64, 122, 144, 232, 234, 235, 240, 241, 243-246, 248, 802, 803 and 1638-1647. In yet another related aspect, the AMP comprises the amino acid sequence of any one of SEQ ID NOs: 32, 36, 62, 64, 122, 232, 235, 246, 803 and 1637.

[0027] In another aspect, the rotifer is a Bdelloid rotifer or a Monogononta rotifer. In a related aspect, the rotifer is of the species Adineta vaga, Philodina acuticornis, or Brachionus.

[0028] In another aspect, the nucleotide sequence encoding the antimicrobial peptide (AMP) comprises any one of SEQ ID NOs: 1648-1651.

[0029] In another aspect, the disclosure provides a transgenic algae comprising an expression vector, wherein the expression vector comprises a promoter, such as a heterologous promoter, operatively linked to a nucleotide sequence encoding an antimicrobial peptide (AMP). In some aspects, the nucleotide sequence encoding the AMP is codon-optimized for expression in algae. In some aspects, the AMP does not substantially inhibit the growth of the algae.

[0030] In another aspect, the AMP is from about 5 to about 200 amino acids in length. In another aspect, the AMP is from about 5 to about 600 amino acids in length. In a related aspect, the AMP is an insecticidal AMP or a non-insecticidal AMP.

[0031] In another aspect, the AMP comprises the amino acid sequence of any one of SEQ ID NOs: 1-1647. In a related aspect, the AMP comprises the amino acid sequence of any one of SEQ ID NOs: 32, 36, 62, 64, 122, 144, 232, 234, 235, 240, 241, 243-246, 248, 802, 803 and 1638-1647. In yet another related aspect, the AMP comprises the amino acid sequence of any one of SEQ ID NOs: 32, 36, 62, 64, 122, 232, 235, 246, 803 and 1637.

[0032] In another aspect, the nucleotide sequence encoding the AMP comprises any one of SEQ ID NOs: 1648-1651.

[0033] In another aspect, the present disclosure provides an expression vector comprising a promoter, such as a heterologous promoter, operatively linked to a nucleotide sequence encoding an antimicrobial peptide (AMP), wherein the nucleotide sequence is codon-optimized for expression in algae. In a related aspect, the nucleotide sequence encoding the AMP comprises any one of SEQ ID NOs: 1648-1651.

[0034] The foregoing and other objects, features, and advantages of the invention will become more apparent from the following detailed description, which proceeds with reference to the accompanying figures.

### BRIEF DESCRIPTION OF THE DRAWINGS

[0035] FIGS. 1A-1F show microscopic images of side-by-side comparison of AMP treated and AMP untreated Adineta vaga, Philodina acuticornis and Brachionus rotifers. FIGS. 1A, 1C and 1E show a 20× magnification of Adineta vaga, Philodina acuticornis and Brachionus (untreated), respectively. FIGS. 1B, 1D and 1F show a 20× magnification of Adineta vaga, Philodina acuticornis and Brachionus (AMP treated), respectively. The rotifers in FIGS. 1B, 1D and 1F had limited to no mobility; the morphology of the rotifers treated with AMPs compared to the untreated rotifers (FIGS. 1A, 1C and 1E) indicates that the rotifers are unhealthy and/or dead.

[0036] FIG. 2 shows a schematic diagram of the pCPSR24 plasmid suitable for engineering algae with codon-optimized AMP nucleotide sequences. The nucleotide sequences of several exemplary AMPs that may be expressed with the expression vector are set forth herein as SEQ ID NOs: 1648-1651.

### SEQUENCE LISTING

[0037] The nucleic and amino acid sequences listed in the accompanying sequence listing are shown using standard letter abbreviations for nucleotide bases, and three letter code for amino acids, as defined in 37 C.F.R. 1.822. Only one strand of each nucleic acid sequence is shown, but the complementary strand is understood as included by any reference to the displayed strand. The Sequence Listing is submitted as an ASCII text file, created on Mar. 12, 2014, 716 KB, which is incorporated by reference herein. In the accompanying sequence listing:

[0038] SEQ ID NOs: 1-1647 are amino acid sequences of antimicrobial peptides (AMPs).

[0039] SEQ ID NOs: 1648-1651 are nucleotide sequences encoding AMPs, codon optimized for expression in C. protothecoides.

### DETAILED DESCRIPTION

### I. Terms and Methods

[0040] Unless otherwise noted, technical terms are used according to conventional usage. Definitions of common terms in molecular biology may be found in Benjamin Lewin, Genes V, published by Oxford University Press, 1994 (ISBN 0-19-854287-9); Kendrew et al. (eds.), The Encyclopedia of Molecular Biology, published by Blackwell Science Ltd., 1994 (ISBN 0-632-02182-9); and Robert A. Meyers (ed.), Molecular Biology and Biotechnology: a Comprehensive Desk Reference, published by VCH Publishers, Inc., 1995 (ISBN 1-56081-569-8).

[0041] In order to facilitate review of the various embodiments of the disclosure, the following explanations of specific terms are provided:

[0042] Algae: Refers to algae species that can be used with the compositions and methods described herein and include for example, Achnanthes orientalis, Agmenellum spp., Amphiprora hyaline, Amphora coffeiformis, Amphora coffeiformis var. linea, Amphora coffeiformis var. punctata, Amphora coffeiformis var. taylori, Amphora coffeiformis var. tenuis, Amphora delicatissima. Amphora delicatissima var. capitata, Amphora sp., Anabaena, Ankistrodesmus, Ankistrodesmus falcatus, Boekelovia hooglandii, Borodinella sp., Botryococcus braunii, Botryococcus sudeticus, Bracteococcus minor, Bracteococcus medionucleatus, Carteria, Chaetoceros gracilis, Chaetoceros muelleri, Chaetoceros muelleri var. subsalsum, Chaetoceros sp., Chlamydomas perigranulata, Chlore lla anitrata, Chlorella antarctica, Chlorella aureoviridis, Chlorella Candida, Chlorella capsulate, Chlorella desiccate, Chlorella ellipsoidea, Chlorella emersonii, Chlorella fusca, Chlorella fusca var. vacuolata, Chlorella glucotropha, Chlorella infusionum, Chlorella infusionum var. actophila, Chlorella infusionum var. auxenophila, Chlorella kessleri, Chlorella lobophora, Chlorella luteoviridis, Chlorella luteoviridis var. aureoviridis, Chlorella luteoviridis var. lutescens, Chlorella miniata, Chlorella minutissima, Chlorella mutabilis, Chlorella nocturna, Chlorella ovalis, Chlorella parva, Chlorella photophila, Chlorella pringsheimii, Chlorella protothecoides, Chlorella protothecoides var. acidicola, Chlorella regularis, Chlorella regularis var. minima, Chlorella regularis var. umbricata, Chlorella reisiglii, Chlorella saccharophila, Chlorella saccharophila var. ellipsoidea, Chlorella salina, Chlorella simplex, Chlorella sorokiniana, Chlorella sp., Chlorella sphaerica, Chlorella stigmatophora, Chlorella vanniellii, Chlorella vulgaris, Chlorella vulgaris fo. tenia, Chlorella vulgaris var. autotrophica, Chlorella vulgaris var. viridis, Chlorella vulgaris var. vulgaris, Chlorella vulgaris var. vulgaris fo. tenia, Chlorella vulgaris var. vulgaris fo. viridis, Chlorella xanthella, Chlorella zofingiensis, Chlorella trebouxioides, Chlorella vulgaris, Chlorococcum infusionum, Chlorococcum sp., Chlorogonium, Chroomonas sp., Chrysosphaera sp., Cricosphaera sp., Crypthecodinium cohnii, Cryptomonas sp., Cyclotella cryptica, Cyclotella meneghiniana, Cyclotella sp., Chlamydomonas moewusii Chlamydomonas reinhardtii Chlamydomonas sp. Dunaliella sp., Dunaliella bardawil, Dunaliella bioculata, Dunaliella granulate, Dunaliella maritime, Dunaliella minuta, Dunaliella parva, Dunaliella peircei, Dunaliella primolecta, Dunaliella salina, Dunaliella terricola, Dunaliella tertiolecta, Dunaliella viridis, Dunaliella tertiolecta, Eremosphaera viridis, Eremosphaera sp., Ellipsoidon sp., Euglena spp., Franceia sp., Fragilaria crotonensis, Fragilaria sp., Gleocapsa sp., Gloeothamnion sp., Haematococcus pluvialis, Hymenomonas sp., Isochrysis aff. galbana, Isochrysis galbana, Lepocinclis, Micractinium, Micractinium, Monoraphidium minutum, Monoraphidium sp., Nannochloris sp., Navicula acceptata, Navicula biskanterae, Navicula pseudotenelloides, Navicula pelliculosa, Navicula saprophila, Navicula sp., Nephrochloris sp., Nephroselmis sp., Nitschia communis, Nitzschia alexandrina, Nitzschia closterium, Nitzschia communis, Nitzschia dissipata, Nitzschia frustulum, Nitzschia hantzschiana, Nitzschia inconspicua, Nitzschia intermedia, Nitzschia microcephala, Nitzschia pusilla, Nitzschia pusilla elliptica, Nitzschia pusilla monoensis, Nitzschia quadrangular, Nitzschia sp., Ochromonas sp., Oocystis parva, Oocystis pusilla, Oocystis sp., Oscillatoria limnetica, Oscillatoria sp., Oscillatoria subbrevis, Parachlorella kessleri, Pascheria acidophila, Pavlova sp., Phaeodactylum tricomutum, Phagus, Phormidium, Platymonas sp., Pleurochrysis carterae, Pleurochrysis dentate, Pleurochrysis sp., Prototheca wickerhamii, Prototheca stagnora, Prototheca portoricensis, Prototheca moriformis, Prototheca zopfii, Pseudochlorella aquatica, Pyramimonas sp., Pyrobotrys, Rhodococcus opacus, Sarcinoid chrysophyte, Scenedesmus armatus, Schizochytrium, Spirogyra, Spirulina platensis, Stichococcus sp., Synechococcus sp., Synechocystisf, Tagetes erecta, Tagetes patula, Tetraedron, Tetraselmis sp., Tetraselmis suecica, Thalassiosira weissflogii, and Viridiella fridericiana.

[0043] Antimicrobial peptide (AMP): A naturally occurring or synthetic linear, branched or cyclic peptide, or a peptide having a linear, branched and/or cyclic structure that generally kills, prevents and/or inhibits the growth of a microorganism.

[0044] Biocompatible: Synthetic and/or natural material that does not have a substantial negative impact on organisms, tissues, cells, biological systems or pathways and/or protein function.

[0045] Biomass: Any algal-based organic matter that may be used for carbon storage and/or as a source of energy (e.g., biofuels).

[0046] Codon-optimized: A “codon-optimized” nucleic acid refers to a nucleic acid sequence that has been altered such that the codons are optimal for expression in a particular system (such as a particular species or group of species). For example, a nucleic acid sequence can be optimized for expression in plant cells, for example, in algae. Codon optimization does not alter the amino acid sequence of the encoded protein.

[0047] Contacting: Placement in direct physical association; includes both in solid and liquid form.

[0048] Growth rate reduction (or reducing rate of growth): Reducing the rate of growth of an individual organism or a population of organisms. Growth rate reduction may include reducing or decreasing, directly or indirectly, the rate at which an organism acquires mass or the rate at which a population of organisms acquires mass (e.g., by stopping (directly or indirectly) ingestion, digestion and/or assimilation of food by the organism) and/or the reproduction of an organism. In the case of rotifers, measuring growth rate reduction may include, but is not limited to, one or more of the following and as compared to rotifers in normal growth conditions: a decrease in motility (e.g., swimming or cilia movement) of the rotifer(s), a decrease in ingestion of algae by rotifer(s), a decrease in the rate of egg production and/or reproduction, a decrease in the rate of feeding, and a decrease in the rate of growth (e.g., size and/or mass) of rotifer(s).

[0049] Inhibiting growth (or growth inhibition): Preventing growth of an individual organism or a population of organisms. Growth inhibition may be as extreme as death or killing of the organism or population of organisms, or may include preventing, directly or indirectly, an increase in the mass of an organism or population of organisms (e.g., by stopping, directly or indirectly, ingestion, digestion and/or assimilation of food by the organism) and/or the reproduction of an organism. In the case of rotifers, measuring growth inhibition may include, but is not limited to, one or more of the following and as compared to rotifers in normal growth conditions: an inhibition of movement (e.g., swimming or cilia movement) of the rotifer(s), an inhibition of ingestion of algae by rotifer(s), an inhibition of the rate of egg production and/or reproduction of rotifer(s), and an inhibition of feeding by rotifer(s).

[0050] Insecticidal: Capable of killing and/or controlling insects. In the context of the present disclosure, an “insecticidal AMP” is an AMP belonging to a class of AMPs that have activity against insects (i.e. are capable of killing and/or controlling insects). As used herein, a “non-insecticidal AMP” is any AMP belonging to a recognized class of AMPs other than the insecticidal class. For example, non-insecticidal AMPs include anticancer/tumor AMPs, anti-protist AMPs, antiparasitic AMPs, spermicidal AMPs, anti-HIV-1 AMPs and chemotactic AMPs.

[0051] Microorganism: Microscopic single cell or multicellular organism. Non-limiting examples of microorganisms include bacteria, protozoa, fungi, rotifers, planarians and viruses.

[0052] Minimal inhibitory concentration (MIC): The lowest concentration of an antimicrobial peptide (e.g., AMP) that will inhibit the visible growth of an organism (e.g., algae).

[0053] Operably linked: A first nucleic acid sequence is operably linked with a second nucleic acid sequence when the first nucleic acid sequence is placed in a functional relationship with the second nucleic acid sequence. For instance, a promoter is operably linked to a coding sequence if the promoter affects the transcription or expression of the coding sequence. Generally, operably linked DNA sequences are contiguous and, where necessary to join two protein-coding regions, in the same reading frame.

[0054] Percent identity: In the context of two or more nucleic acids or peptide sequences, refers to two or more sequences or subsequences that are the same or have a specified percentage of amino acid residues or nucleotides that are the same (i.e., about 60%, 65%, 70%, 75%, 80%, 85%, 90%, 91%, 92%, 93%, 94%, 95%, 96%, 97%, 98%, 99%, or higher identity over a specified region, when compared and aligned for maximum correspondence over a comparison window or designated region) as measured, for example, using a BLAST or BLAST 2.0 sequence comparison algorithm with default parameters described below, or by manual alignment and visual inspection.

[0055] Promoter: A region of DNA that directs/initiates transcription of a nucleic acid (e.g. a gene). A promoter includes necessary nucleic acid sequences near the start site of transcription. Typically, promoters are located near the genes they transcribe. A promoter also optionally includes distal enhancer or repressor elements which can be located as much as several thousand base pairs from the start site of transcription.

[0056] Rotifers: Microscopic, multicellular, pseudocoelomate animals of the phylum Rotifera. Rotifers can be found in many freshwater environments and in moist soil. Some rotifer species can be found in saltwater.

[0057] Transgenic algae: Algae whose genetic material has been altered using genetic engineering techniques so that it is no longer a “wild type” organism. An example of genetically modified algae is transgenic algae that possess one or more genes that have been transferred to the algae from a different species. Another example is an alga wherein endogenous genes have been rearranged such that they are in a different and advantageous arrangement or amplified so that specific sequences are increased. In this example, no foreign DNA remains in the modified cell.

[0058] Vector: A vector is a nucleic acid molecule allowing insertion of foreign nucleic acid without disrupting the ability of the vector to replicate and/or integrate in a host cell. A vector can include nucleic acid sequences that permit it to replicate in a host cell, such as an origin of replication. A vector can also include one or more selectable marker genes and other genetic elements. An expression vector is a vector that contains the necessary regulatory sequences to allow transcription and translation of inserted gene or genes.

[0059] Wild-type: The phenotype of the typical form of a species as it occurs in nature.

[0060] Unless otherwise explained, all technical and scientific terms used herein have the same meaning as commonly understood by one of ordinary skill in the art to which this disclosure belongs. The singular terms “a,” “an,” and “the” include plural referents unless context clearly indicates otherwise. “Comprising A or B” means including A, or B, or A and B. It is further to be understood that all base sizes or amino acid sizes, and all molecular weight or molecular mass values, given for nucleic acids or polypeptides are approximate, and are provided for description.

[0061] Further, ranges provided herein are understood to be shorthand for all of the values within the range. For example, a range of 1 to 50 is understood to include any number, combination of numbers, or sub-range from the group consisting of 1, 2, 3, 4, 5, 6, 7, 8, 9, 10, 11, 12, 13, 14, 15, 16, 17, 18, 19, 20, 21, 22, 23, 24, 25, 26, 27, 28, 29, 30, 31, 32, 33, 34, 35, 36, 37, 38, 39, 40, 41, 42, 43, 44, 45, 46, 47, 48, 49 and 50 (as well as fractions thereof unless the context clearly dictates otherwise). Any concentration range, percentage range, ratio range, or integer range is to be understood to include the value of any integer within the recited range and, when appropriate, fractions thereof (such as one tenth and one hundredth of an integer), unless otherwise indicated. Also, any number range recited herein relating to any physical feature, such as polymer subunits, size or thickness, are to be understood to include any integer within the recited range, unless otherwise indicated. As used herein, “about” or “consisting essentially of” mean±20% of the indicated range, value, or structure, unless otherwise indicated. As used herein, the terms “include” and “comprise” are open ended and are used synonymously. It should be understood that the terms “a” and “an” as used herein refer to “one or more” of the enumerated components. The use of the alternative (e.g., “or”) should be understood to mean either one, both, or any combination thereof of the alternatives

[0062] Although methods and materials similar or equivalent to those described herein can be used in the practice or testing of the present disclosure, suitable methods and materials are described below. All publications, patent applications, patents, and other references mentioned herein are incorporated by reference in their entirety. In case of conflict, the present specification, including explanations of terms, will control. In addition, the materials, methods, and examples are illustrative only and not intended to be limiting.

### II. Overview of Several Embodiments

[0063] The present disclosure relates generally to compositions and methods for controlling, inhibiting, reducing and/or preventing rotifer growth using peptides. More specifically the disclosure relates to removing and/or preventing rotifer infestations in algae cultivations by the expression of one or more antimicrobial peptides (AMPs) by transgenic algae and/or the introduction of one or more AMPs in an algae cultivation (e.g., open-pond system). The present disclosure also provides expression vectors comprising a heterologous promoter operably linked to a nucleotide sequence encoding an AMP, as well as transgenic algae comprising the expression vectors.

[0064] Novel aspects of the present disclosure include the use of biomolecules (e.g., AMPs) to control, reduce and/or prevent the growth of metazoan organisms such as rotifers. This disclosure provides the utility of AMPs in controlling rotifer populations (e.g., controlling, inhibiting, reducing, prevent and/or killing) by engineering algae to express one or more of these peptides in the algae of choice to confer innate defense capabilities against these indiscriminate algae grazers. There are thousands of natural AMPs that have been identified thus far (see e.g., the Antimicrobial Peptide Database, which is available online).

[0065] Additional embodiments include a method for inhibiting the growth of one or more rotifers comprising contacting one or more rotifers with an isolated antimicrobial peptide (AMP), wherein the growth of the one or more rotifers is inhibited by the AMP compared to the growth of the one or more rotifers absent the AMP.

[0066] In another aspect, the AMP is from about 5 to about 200 amino acids in length. In another aspect, the AMP is from about 5 to about 600 amino acids in length. In a related aspect, the AMP is an insecticidal AMP or a non-insecticidal AMP. In a related aspect, the concentration of the AMP is from about 0.5 μM to about 1000 μM (or from about 0.5, 1, 2, 3, 4, 5, 6, 7, 8, 9, 10, 11, 12, 13, 14, 15, 16, 17, 18, 19, 20, 21, 22, 23, 24, 25, 26, 27, 28, 29, 30, 31, 32, 33, 34, 35, 36, 37, 38, 39, 40, 41, 42, 43, 44, 45, 46, 47, 48, 49 or 50, 60, 70, 80, 90, 100, 110, 120, 130, 140, 150, 160, 170, 180, 190, 200, 210, 220, 230, 240, 250, 260, 270, 280, 290, 300, 310, 320, 330, 340, 350, 360, 370, 380, 390, 400, 410, 420, 430, 440, 450, 460, 470, 480, 490, 500, 560, 570, 580, 590, 600, 610, 620, 630, 640, 650, 660, 670, 680, 690, 700, 710, 720, 730, 740, 750, 760, 770, 780, 790, 800, 810, 820, 830, 840, 850, 860, 870, 880, 890, 900, 910, 920, 930, 940, 950, 960, 970, 980, 990 or 1000 μM).

[0067] In another aspect, the AMP comprises the amino acid sequence of any one of SEQ ID NOs: 1-1647. In a related aspect, the AMP comprises the amino acid sequence of any one of SEQ ID NOs: 32, 36, 62, 64, 122, 144, 232, 234, 235, 240, 241, 243-246, 248, 802, 803 and 1638-1647. In yet another related aspect, the AMP comprises the amino acid sequence of any one of SEQ ID NOs: 32, 36, 62, 64, 122, 232, 235, 246, 803 and 1637.

[0068] In another aspect, the one or more rotifers are Bdelloid rotifers, Monogononta rotifers or a combination thereof. In a related aspect, the one or more rotifers are of the species Adineta vaga, Philodina acuticornis, Brachionus or any combination thereof.

[0069] In another aspect, the disclosure provides for a method for reducing the growth rate of one or more rotifers comprising contacting one or more rotifers with an isolated antimicrobial peptide (AMP), wherein the growth rate of the one or more rotifers is reduced by the presence of the AMP compared to the growth rate of the one or more rotifers absent the AMP.

[0070] In another aspect, the AMP is from about 5 to about 200 amino acids in length. In another aspect, the AMP is from about 5 to about 600 amino acids in length. In a related aspect, the AMP is an insecticidal AMP or a non-insecticidal AMP. In a related aspect, the concentration of the AMP is from about 0.5 μM to about 1000 μM (or from about 0.5, 1, 2, 3, 4, 5, 6, 7, 8, 9, 10, 11, 12, 13, 14, 15, 16, 17, 18, 19, 20, 21, 22, 23, 24, 25, 26, 27, 28, 29, 30, 31, 32, 33, 34, 35, 36, 37, 38, 39, 40, 41, 42, 43, 44, 45, 46, 47, 48, 49 or 50, 60, 70, 80, 90, 100, 110, 120, 130, 140, 150, 160, 170, 180, 190, 200, 210, 220, 230, 240, 250, 260, 270, 280, 290, 300, 310, 320, 330, 340, 350, 360, 370, 380, 390, 400, 410, 420, 430, 440, 450, 460, 470, 480, 490, 500, 560, 570, 580, 590, 600, 610, 620, 630, 640, 650, 660, 670, 680, 690, 700, 710, 720, 730, 740, 750, 760, 770, 780, 790, 800, 810, 820, 830, 840, 850, 860, 870, 880, 890, 900, 910, 920, 930, 940, 950, 960, 970, 980, 990 or 1000 μM).

[0071] In another aspect, the AMP comprises the amino acid sequence of any one of SEQ ID NOs: 1-1647. In a related aspect, the AMP comprises the amino acid sequence of any one of SEQ ID NOs: 32, 36, 62, 64, 122, 144, 232, 234, 235, 240, 241, 243-246, 248, 802, 803 and 1638-1647. In yet another related aspect, the AMP comprises the amino acid sequence of any one of SEQ ID NOs: 32, 36, 62, 64, 122, 232, 235, 246, 803 and 1637.

[0072] In another aspect, the one or more rotifers are Bdelloid rotifers, Monogononta rotifers or a combination thereof. In a related aspect, the one or more rotifers are of the species Adineta vaga, Philodina acuticornis, Brachionus or any combination thereof.

[0073] In another aspect, the disclosure provides for a composition comprising a rotifer and an antimicrobial peptide (AMP). In a related aspect, the growth of the rotifer is inhibited by the AMP compared to the growth of the rotifer absent the AMP. In yet another related aspect, the growth rate of the rotifer is reduced by the presence of the AMP compared to the growth rate of the rotifer absent the AMP.

[0074] In another aspect, the composition further comprises algae. In a related aspect, the AMP does not substantially inhibit the growth of the algae. In the context of the present disclosure, “does not substantially inhibit” means inhibits less than 10%, such as less than 9%, less than 8%, less than 7%, less than 6% or less than 5%. In another aspect, the AMP is from about 5 to about 200 amino acids in length. In another aspect, the AMP is from about 5 to about 600 amino acids in length. In a related aspect, the AMP is an insecticidal AMP or a non-insecticidal AMP. In a related aspect, the concentration of the AMP is from about 0.5 μM to about 1000 μM (or from about 0.5, 1, 2, 3, 4, 5, 6, 7, 8, 9, 10, 11, 12, 13, 14, 15, 16, 17, 18, 19, 20, 21, 22, 23, 24, 25, 26, 27, 28, 29, 30, 31, 32, 33, 34, 35, 36, 37, 38, 39, 40, 41, 42, 43, 44, 45, 46, 47, 48, 49 or 50, 60, 70, 80, 90, 100, 110, 120, 130, 140, 150, 160, 170, 180, 190, 200, 210, 220, 230, 240, 250, 260, 270, 280, 290, 300, 310, 320, 330, 340, 350, 360, 370, 380, 390, 400, 410, 420, 430, 440, 450, 460, 470, 480, 490, 500, 560, 570, 580, 590, 600, 610, 620, 630, 640, 650, 660, 670, 680, 690, 700, 710, 720, 730, 740, 750, 760, 770, 780, 790, 800, 810, 820, 830, 840, 850, 860, 870, 880, 890, 900, 910, 920, 930, 940, 950, 960, 970, 980, 990 or 1000 μM).

[0075] In another aspect, the AMP comprises the amino acid sequence of any one of SEQ ID NOs: 1-1647. In a related aspect, the AMP comprises the amino acid sequence of any one of SEQ ID NOs: 32, 36, 62, 64, 122, 144, 232, 234, 235, 240, 241, 243-246, 248, 802, 803 and 1638-1647. In yet another related aspect, the AMP comprises the amino acid sequence of any one of SEQ ID NOs: 32, 36, 62, 64, 122, 232, 235, 246, 803 and 1637.

[0076] In another aspect, the rotifers are Bdelloid rotifers, Monogononta rotifers or a combination thereof. In a related aspect, the rotifers are of the species Adineta vaga, Philodina acuticornis, Brachionus or any combination thereof.

[0077] In another aspect, the disclosure provides for a method for preventing a rotifer infestation of an algae culture comprising contacting an algae culture with an isolated antimicrobial peptide (AMP), wherein the concentration of the AMP in the algae culture is sufficient to inhibit the growth of and/or reduce the rate of growth of a rotifer in the algae culture.

[0078] In a related aspect, the AMP does not substantially inhibit the growth of the algae.

[0079] In another aspect, the AMP is from about 5 to about 200 amino acids in length. In another aspect, the AMP is from about 5 to about 600 amino acids in length. In a related aspect, the AMP is an insecticidal AMP or a non-insecticidal AMP. In a related aspect, the concentration of the AMPin the algae culture is from about 0.5 μM to about 1000 μM (or from about 0.5, 1, 2, 3, 4, 5, 6, 7, 8, 9, 10, 11, 12, 13, 14, 15, 16, 17, 18, 19, 20, 21, 22, 23, 24, 25, 26, 27, 28, 29, 30, 31, 32, 33, 34, 35, 36, 37, 38, 39, 40, 41, 42, 43, 44, 45, 46, 47, 48, 49 or 50, 60, 70, 80, 90, 100, 110, 120, 130, 140, 150, 160, 170, 180, 190, 200, 210, 220, 230, 240, 250, 260, 270, 280, 290, 300, 310, 320, 330, 340, 350, 360, 370, 380, 390, 400, 410, 420, 430, 440, 450, 460, 470, 480, 490, 500, 560, 570, 580, 590, 600, 610, 620, 630, 640, 650, 660, 670, 680, 690, 700, 710, 720, 730, 740, 750, 760, 770, 780, 790, 800, 810, 820, 830, 840, 850, 860, 870, 880, 890, 900, 910, 920, 930, 940, 950, 960, 970, 980, 990 or 1000 μM).

[0080] In another aspect, the AMP comprises the amino acid sequence of any one of SEQ ID NOs: 1-1647. In a related aspect, the AMP comprises the amino acid sequence of any one of SEQ ID NOs: 32, 36, 62, 64, 122, 144, 232, 234, 235, 240, 241, 243-246, 248, 802, 803 and 1638-1647. In yet another related aspect, the AMP comprises the amino acid sequence of any one of SEQ ID NOs: 32, 36, 62, 64, 122, 232, 235, 246, 803 and 1637.

[0081] In another aspect, the rotifers are Bdelloid rotifers, Monogononta rotifers or a combination thereof. In a related aspect, the rotifers are of the species Adineta vaga, Philodina acuticornis, Brachionus or any combination thereof.

[0082] In another aspect, the disclosure provides a transgenic algae comprising an expression vector, wherein the expression vector comprises a promoter, such as as heterologous promoter, operatively linked to a nucleotide sequence encoding an antimicrobial peptide (AMP). In some aspects, the nucleotide sequence encoding the AMP is codon-optimized for expression in algae. In some aspects, the AMP does not substantially inhibit the growth of the algae.

[0083] In another aspect, the AMP is from about 5 to about 200 amino acids in length. In another aspect, the AMP is from about 5 to about 600 amino acids in length. In a related aspect, the AMP is an insecticidal AMP or a non-insecticidal AMP.

[0084] In another aspect, the AMP comprises the amino acid sequence of any one of SEQ ID NOs: 1-1647. In a related aspect, the AMP comprises the amino acid sequence of any one of SEQ ID NOs: 32, 36, 62, 64, 122, 144, 232, 234, 235, 240, 241, 243-246, 248, 802, 803 and 1638-1647. In yet another related aspect, the AMP comprises the amino acid sequence of any one of SEQ ID NOs: 32, 36, 62, 64, 122, 232, 235, 246, 803 and 1637.

[0085] In another aspect, the nucleotide sequence encoding the AMP comprises any one of SEQ ID NOs: 1648-1651.

[0086] In another aspect, the present disclosure provides an expression vector comprising a promoter, such as as heterologous promoter, operatively linked to a nucleotide sequence encoding an antimicrobial peptide (AMP), wherein the nucleotide sequence is codon-optimized for expression in algae. In a related aspect, the nucleotide sequence encoding the AMP comprises any one of SEQ ID NOs: 1648-1651.

[0087] A. Antimicrobial Peptides (AMPs)

[0088] AMPs are a class of peptides that demonstrate antimicrobial activity against microorganisms. Generally, these peptides may be naturally occurring or synthetic and range in size from about 5 amino acids to about 200 amino acids in length (or 5, 6, 7, 8, 9, 10, 11, 12, 13, 14, 15, 16, 17, 18, 19, 20, 21, 22, 23, 24, 25, 26, 27, 28, 29, 30, 31, 32, 33, 34, 35, 36, 37, 38, 39, 40, 41, 42, 43, 44, 45, 46, 47, 48, 49, 50, 51, 52, 53, 54, 55, 56, 57, 58, 59, 60, 61, 62, 63, 64, 65, 66, 67, 68, 69, 70, 71, 72, 73, 74, 75, 76, 78, 79, 80, 81, 82, 83, 84, 85, 86, 87, 88, 89, 90, 91, 92, 93, 94, 95, 96, 97, 98, 99, 100, 101, 102, 103, 104, 105, 106, 107, 108, 109, 110, 111, 112, 113, 114, 115, 116, 117, 118, 119, 120, 121, 122, 123, 124, 125, 126, 127, 128, 129, 130, 131, 132, 133, 134, 135, 136, 137, 138, 139, 140, 141, 142, 143, 144, 145, 146, 147, 148, 149, 150, 151, 152, 153, 154, 155, 156, 157, 158, 159, 160, 161, 162, 163, 164, 165, 166, 167, 168, 169, 170, 171, 172, 173, 174, 175, 176, 177, 178, 179, 180, 181, 182, 183, 184, 185, 186, 187, 188, 189, 190, 191, 192, 193, 194, 195, 196, 197, 198, 199 or 200 amino acids in length). In most cases, the peptides range in size from about 12 amino acids to about 75 amino acids in length (or 12, 13, 14, 15, 16, 17, 18, 19, 20, 21, 22, 23, 24, 25, 26, 27, 28, 29, 30, 31, 32, 33, 34, 35, 36, 37, 38, 39, 40, 41, 42, 43, 44, 45, 46, 47, 48, 49, 50, 51, 52, 53, 54, 55, 56, 57, 58, 59, 60, 61, 62, 63, 64, 65, 66, 67, 68, 69, 70, 71, 72, 73, 74 or 75 amino acids in length). In other cases, the AMP is from about 5 to about 600 amino acids in length. These peptides typically comprise two or more positively charged amino acids. Non-limiting examples of amino acid residues that may provide a positive charge include arginine, lysine and histidine. Further, these peptides may be amphipathic. The peptides may comprise a hydrophobic domain, resulting from the presence of hydrophobic amino acid residues. The peptides may comprise at least about 30% hydrophobic residues, 40% hydrophobic residues, 50% hydrophobic residues, 60% hydrophobic residues, 70% hydrophobic residues, 80% hydrophobic residues or 90% hydrophobic residues. The peptides may comprise a linear chain of amino acids, a region of branched amino acids and/or cyclic region of amino acids. An example cyclic peptide includes, but is not limited to, peptides produced by non-ribosomal peptide synthetase (NRPS) (e.g., cyanobacteria derived peptides) or mixed system of NRPS and polyketide synthetases.

[0089] In certain aspects, the concentration of the AMP (such as the concentratin of the AMP in an algae culture) is from about 0.5 μM to about 50 μM (or from about 0.5, 1, 2, 3, 4, 5, 6, 7, 8, 9, 10, 11, 12, 13, 14, 15, 16, 17, 18, 19, 20, 21, 22, 23, 24, 25, 26, 27, 28, 29, 30, 31, 32, 33, 34, 35, 36, 37, 38, 39, 40, 41, 42, 43, 44, 45, 46, 47, 48, 49 or 50). In a related aspect, the concentration of the AMP is from about 0.5 μM to about 500 μM (or from about 0.5, 1, 2, 3, 4, 5, 6, 7, 8, 9, 10, 11, 12, 13, 14, 15, 16, 17, 18, 19, 20, 21, 22, 23, 24, 25, 26, 27, 28, 29, 30, 31, 32, 33, 34, 35, 36, 37, 38, 39, 40, 41, 42, 43, 44, 45, 46, 47, 48, 49 or 50, 60, 70, 80, 90, 100, 110, 120, 130, 140, 150, 160, 170, 180, 190, 200, 210, 220, 230, 240, 250, 260, 270, 280, 290, 300, 310, 320, 330, 340, 350, 360, 370, 380, 390, 400, 410, 420, 430, 440, 450, 460, 470, 480, 490 or 500 μM).

[0090] The mechanisms by which AMPs act varies and may include disrupting membranes, interfering with metabolism and targeting cytoplasmic components. The initial contact between the peptide and the target organism is electrostatic, as most bacterial surfaces are anionic, or hydrophobic, such as in the antimicrobial peptide Piscidin. Their amino acid composition, amphipathicity, cationic charge and size allow them to attach to and insert into membrane bilayers to form pores by ‘barrel-stave,’ ‘carpet’ or ‘toroidal-pore’ mechanisms. Alternately, they may penetrate into the cell to bind intracellular molecules which are crucial to cell living. Intracellular binding models include inhibition of cell wall synthesis, alteration of the cytoplasmic membrane, activation of autolysin, inhibition of DNA, RNA, and protein synthesis, and inhibition of certain enzymes. However, in many cases, the exact mechanism of killing is not known. In contrast to many conventional antibiotics, the activity of these peptides appears to be bactericidal (bacteria killer) instead of bacteriostatic (bacteria growth inhibitor). In general, the antimicrobial activity of these peptides is determined by measuring the minimal inhibitory concentration (MIC), which is the lowest concentration of drug that inhibits bacterial growth.

[0091] In addition to exhibiting antimicrobial activity, these peptides have shown to have a number of immunomodulatory functions that may be involved in the clearance of infection, including the ability to alter host gene expression, act as chemokines and/or induce chemokine production, inhibiting lipopolysaccharide induced pro-inflammatory cytokine production, promoting wound healing, and modulating the responses of dendritic cells and cells of the adaptive immune response. Animal models indicate that host defense peptides are crucial for both prevention and clearance of infection. It appears as though many peptides initially isolated as and termed “antimicrobial peptides” have been shown to have more significant alternative functions in vivo (e.g., hepcidin).

[0092] The amino acid sequences of exemplary AMPs are provided below in Table 1. An “X” in an amino acid sequence indicates that the amino acid residue at that position of the peptide may be any amino acid residue.

TABLE 1

| SEQ ID NO: | AMINO ACID SEQUENCE |
|---|---|
| 1 | SIGTAVKKAVPIAKKVGKVAIPIAKAVLSVVGQLVG |
| 2 | ELDRICGYGTARCRKKCRSQEYRIGRCPNTYACCLRKWDESLLNRTKP |
| 3 | GLKDKFKSMGEKLKQYIQTWKAKF |
| 5 | RFRPPIRRPPIRPPFYPPFRPPIRPPIFPPIRPPFRPPLRFP |
| 6 | ICIFCCGCCHRSKCGMCCKT |
| 7 | FLSLLPSIVSGAVSLAKKLG |
| 8 | VRPYLVAF |
| 9 | KTCENLADTY |
| 10 | GPLSCRRNGGVCIPIRCPGPMRQIGTCFGRPVKCCRSW |
| 11 | FLPIIAKLLGGLL |
| 12 | FLPIPRPILLGLL |
| 13 | FLIIRRPIVLGLL |
| 14 | GLHKVMREVLGYERNSYKKFFLR |
| 15 | INWKKIAEVGGKILSSL |
| 16 | INWKGIAAMAKKLL |
| 17 | INWKKIAEIGKQVLSAL |
| 18 | INWKGIAAMKKLL |
| 19 | SNDIYFNFQR |
| 20 | FLPMLAGLAANFLPKLFCKITKKC |
| 21 | FLPLAVSLAANFLPKLFCKITKKC |
| 22 | FLPMLAGLAANLLPKLFCKITKKC |
| 23 | FLPMLAGLAANFLPELFCKITKKC |
| 24 | FLPIVGKLLSGLSGLL |
| 25 | FLPIVGKLLSGLL |
| 26 | LLPIVGKLLSGLL |
| 27 | IDWKKLLDAAKQIL |
| 28 | ILGTILGLLKSL |
| 29 | KQATVGDINTERPGILDLKGKAKWDAWNGLKGTSKEDAMKAYINKVEELK |
| | KKYGI |
| 30 | RPRPNYRPRPIYRP |
| 31 | GLLSVLGSVAKHVLPHVVPVIAEKL |
| 32 | FLPLIGRVLSGIL |
| 33 | LLPILGNLLNGLL |
| 34 | LLPIVGNLLNSLL |
| 35 | VLPIIGNLLNSLL |
| 36 | FLPLIGKVLSGIL |
| 37 | RNIICLMQHGTCRLFFCRSGEKKSEICSDPWNRCCI |
| 38 | GLWSTIKNVGKEAAIAAGKAALGAL |
| 39 | NLYQFKNMIQCAGTQLCVAYVKYGCYCGPGGTGTPLDQLDRCCQTHDHCY |
| | DNAKKFGNCIPYFKTYEYTCNKPDLTCTDAKGSCARNVCDCDRAAAICFAA |
| | APYNLANFGINKETHCQ |
| 41 | GIGASILSAGKSALKGLAKGLAEHFAN |
| 42 | GIGSAILSAGKSALKGLAKGLAEHFAN |
| 43 | GIGAAILSAGKSALKGLAKGLAEHF |
| 45 | GIGGALLSAAKVGLKGLAKGLAEHFAN |
| 46 | SMWSGMWRRKLKKLRNALKKKLKGE |
| 47 | GLFGKLIKKFGRKAISYAVKKARGKH |
| 48 | GLFGKLIKKFGRKAISYAVKKARGKN |
| 49 | SWKSMAKKLKEYMEKLKQRA |
| 50 | SWASMAKKLKEYMEKLKQRA |
| 51 | GLKDKFKSMGEKLKQYIQTWKAKF |
| 52 | SLKDKVKSMGEKLKQYIQTWKAKF |
| 53 | GFFGKMKEYFKKFGASFKRRFANLKKRL |
| 54 | TKYYGNGVYCNSKKCWVDWGTAQGCIDVVIGQLGGGIPGKGKC |
| 55 | AGETHTVMINHAGRGAPKLVVGGKKLS |
| 56 | SDEKASPDRHHRFSLSRYAKLANRLSKWIGNRGNRLANPKLLETFKSV |
| 57 | SWLSKTAKKLENSAKKRISEGIAIAIQGGPR |
| 58 | WNPFKELERAGQRVRDAVISAAPAVATVGQAAAIARG |
| 59 | WNPFKELERAGQRVRDAIISAGPAVATVGQAAAIARG |
| 60 | WNPFKELERAGQRVRDAIISAAPAVATVGQAAAIARG |
| 61 | WNPFKELERAGQRVRDAVISAAAVATVGQAAAIARGG |
| 62 | KWKLFKKIEKVGQNIRDGIIKAGPAVAVVGQATQIAK |
| 63 | KWKIFKKIEKVGRNIRNGIIKAGPAVAVLGEAKAL |
| 64 | KWKVFKKIEKMGRNIRNGIVKAGPAIAVLGEAKAL |
| 65 | WNPFKELERAGQRVRDAIISAGPAVATVAQATALAK |
| 66 | WNPFKELEKVGQRVRDAVISAGPAVATVAQATALAK |
| 67 | LSCKRGTCHFGRCPSHLIKGSCSGG |
| 68 | RRIRPRPPRLPRPRPRPLPFPRPGPRPIPRPLPFPRPGPRPIPRPLPFPRPGPRP |
| 69 | VRNHVTCRINRGFCVPIRCPGRTRQIGTCFGPRIKCCRSW |
| 70 | VRNFVTCRINRGFCVPIRCPGHRRQIGTCLGPQIKCCR |
| 71 | GPLSCGRNGGVCIPIRCPVPMRQIGTCFGRPVKCCRSW |
| 72 | SGISGPLSCGRNGGVCIPIRCPVPMRQIGTCFGRPVKCCRSW |
| 73 | SLQGGAPNFPQPSQQNGGWQVSPDLGRDDKGNTRGQIEIQNKGKDHDFNAG |
| | WGKVIRGPNKAKPTWHVGGTYRR |
| 75 | DCLSGRYKGPCAVWDNETCRRVCKEEGRSSGHCSPSLKCWCEGC |
| 76 | SLFSLIKAGAKFLGKNLLKQGACYAACKASKQC |
| 77 | GIMSIVKDVAKNAAKEAAKGALSTLSCKLAKTC |
| 78 | GIMSIVKDVAKTAAKEAAKGALSTLSCKLAKTC |
| 79 | FLPLLAGLAANFLPTIICKISYKC |
| 81 | GLRKRLRKFRNKIKEKLKKI |
| 82 | FLPLILRKIVTAL |
| 83 | LRDLVCYCRSRGCKGRERMNGTCRKGHLLYTLCCR |
| 84 | VVCACRRALCLPRERRAGFCRIRGRIHPLCCRR |
| 85 | VVCACRRALCLPLERRAGFCRIRGRIHPLCCRR |
| 86 | GFGCPLDQMQCHRHCQTITGRSGGYCSGPLKLTCTCYR |
| 87 | ACAAHCLLRGNRGGYCNGKG |
| 89 | FLPLLASLFSRLL |
| 90 | FLPLIGKILGTILGK |
| 91 | FLPLLASLFSRLF |
| 92 | FLPVILPVIGKLLNGILGK |
| 94 | ISDYSIAMDKIRQQDFVNWLLAQKGKKSDWKHNITQ |
| 95 | KAVAAKKSPKKAKKPATPKKAAKSPKKVKKPAAAAKKAAKSPKKATKAAK |
| | PKAAKPKAAKAKKAAPKKK |
| 96 | FLPLLFGAISHLL |
| 97 | AERVGAGAPVYL |
| 98 | FLPLVRGAAKLIPSVVCAISKRC |
| 99 | GFSSLFKAGAKYLLKSVGKAGAQQLACKAANNCA |
| 100 | GVITDALKGAAKTVAAELLRKAHCKLTNSC |
| 101 | SIWEGIKNAGKGFLVSILDKVRCKVAGGCNP |
| 102 | GLFSVLGSVAKHLLPHVAPIIAEKL |
| 103 | GLFSVLGSVAKHLLPHVVPVIAEKL |
| 104 | GLFKVLGSVAKHLLPHVAPIIAEKL |
| 105 | GLWEKVKEKANELVSGIVEGVK |
| 106 | GLFSKFNKKKIKSGLIKIIKTAGKEAGLEALRTGIDVIGCKIKGEC |
| 107 | GLFSKFNKKKIKSGLFKIIKTAGKEAGLEALRTGIDVIGCKIKGEC |
| 108 | GFFSLIKGVAKIATKGLAKNLGKMGLDLVGCKISKEC |
| 109 | VIDDLKKVAKKVRRELLCKKHHKKLN |
| 110 | GFISTVKNLATNVAGTVIDTIKCKVTGGC |
| 111 | AIMDTIKDTAKTVAVGLLNKLKCKITGC |
| 112 | GIMDTIKDTAKTVAVGLLNKLKCKITGC |
| 113 | DSHAKRHHGYKRKFHEKHHSHRGYRSNYLYDN |
| 114 | ALLHHGLNCAKGVLA |
| 115 | WLNALLHHGLNCAKGVLA |
| 116 | GILDTIKSIASKVWNSKTVQDLKRKGINWVANKLGVSPQAA |
| 117 | ITSISLCTPGCKTGALMGCNMKTATCHCSIHVSK |
| 120 | QVVRNPQSCRWNMGVCIPISCPGNMRQIGTCFGPRVPCCR |
| 121 | GIGKFLHSAGKFGKAFVGEIMKS |
| 122 | GIGKFLHSAKKFGKAFVGEIMNS |
| 123 | RSGRGECRRQCLRRHEGQPWETQECMRRCRRRG |
| 124 | ACHAHCQSVGRRGGYCGNFRMTCYCY |
| 125 | NCIQQCVSKGAQGGYCTNEKCTCY |
| 126 | GRFKRFRKKFKKLFKKLS |
| 127 | GGLRSLGRKILRAWKKYG |
| 128 | FAEPTBSEEEGESYSKEVPEMEKRYGGFM |
| 129 | AELRCMCIKTTSGIHPKNIQSLEVIGKGTHCNQVEVIATLKDGRKICLDPDAPR |
| | IKKIVQKKLAGD |
| 130 | RRWCFRVCYRGFCYRKCR |
| 131 | RRWCFRVCYKGFCYRKCR |
| 132 | FCTMIPIPRCY |
| 133 | RVCFAIPLPICH |
| 134 | RVCYAIPLPICY |
| 135 | RVCYAIPLPIC |
| 136 | SIGSALKKALPVAKKIGKIALPIAKAALP |
| 137 | GWLKKIGKKIERVGQHTRDATIQGLGIAQQAANVAATAR |
| 138 | GWLKKIGKKIERVGQHTRDATIQVIGVAQQAANVAATAR |
| 139 | GWLRKIGKKIERVGQHTRDATIQVLGIAQQAANVAATAR |
| 140 | GWIRDFGKRIERVGQHTRDATIQTIAVAQQAANVAATLKG |
| 141 | QGVRNHVTCRIYGGFCVPIRCPGRTRQIGTCFGRPVKCCRRW |
| 142 | QGVRNFVTCRINRGFCVPIRCPGHRRQIGTCLGPRIKCCR |
| 143 | RRCICTTRTCRFPYRRLGTCLFQNRVYTFCC |
| 144 | KWCFRVCYRGICYRRCR |
| 145 | RWCFRVCYRGICYRKCR |
| 146 | KWCFRVCYRGICYRKCR |
| 147 | NPVSCVRNKGICVPIRCPGSMKQIGTCVGRAVKCCRKK |
| 148 | AGFAAQAAASLAPVAAQQL |
| 149 | KSCCRNTWARNCYNVCRLPGTISREICAKKCDCKIISGTTCPSDYPK |
| 150 | SLGSFLKGVGTTLASVGKVVSDQFGKLLQAGQ |
| 151 | ALWKNMLKGIGKLAGQAALGAVKTLVGA |
| 152 | ALWKDILKNVGKAAGKAVLNTVTDMVNQ |
| 153 | GWMSKIASGIGTFLSGMQQ |
| 154 | ACNFQSCWATCQAQHSIYFRRAFCDRSQCKCVFVRG |
| 155 | EWEPVQNGGSSYYMVPRIWA |
| 157 | GKLQAFLAKMKEIAAQTL |
| 158 | GRLQAFLAKMKEIAAQTL |
| 159 | KVNVNAIKKGGKAIGKGFKVISAASTAHDVYEHIKNRRH |
| 160 | GKIPVKAIKKGGQIIGKALRGINIASTAHDIISQFKPKKKKNH |
| 161 | KVPIGAIKKGGKIIKKGLGVIGAAGTAHEVYSHVKNRH |
| 162 | KVPIGAIKKGGKIIKKGLGVLGAAGTAHEVYNHVRNRQ |
| 163 | KVPIGAIKKGGKIIKKGLGVIGAAGTAHEVYSHVKNRQ |
| 164 | KVPVGAIKKGGKAIKTGLGVVGAAGTAHEVYSHIRNRH |
| 165 | KGIGSALKKGGKIIKGGLGALGAIGTGQQVYEHVQNRQ |
| 166 | GWASKIGQTLGKIAKVGLKELIQPK |
| 168 | FLSLIPHAINAVSAIAKHFG |
| 169 | VIGSILGALASGLPTLISWIKNR |
| 170 | AIGSILGALAKGLPTLISWIKNR |
| 171 | YYGNGVYCTKNKCTVDWAKATTCIAGMSIGGFLGG |
| 172 | NFVTCRINRGFCVPIRCPGHRRQIGTCLGPRIKCCR |
| 173 | SIITMTKEAKLPQLWKQIACRLYNTC |
| 174 | ETESTPDYLKNIQQQLEEYTKNFNTQVQNAFDSDKIKSEVNNFIESLGKILNTE |
| | KKEAPK |
| 175 | ENFFKEIERAGQRIRDAIISAAPAVETLAQAQKIIKGGD |
| 176 | DTLIGSCVWGATNYTSDCNAECKRRGYKGGHCGSFLNVNCWCEE |
| 177 | DKLIGSCVWGATNYTSDCNAECKRRGYKGGHCGSFWNVNCWCEE |
| 178 | EADEPLWLYKGDNIERAPTTADHPILPSIIDDVKLDPNRRYA |
| 179 | DIQIPGIKKPTHRDIIIPNWNPNVRTQPWQRFGGNKS |
| 180 | EIRLPEPFRFPSPTVPKPIDIDPILPHPWSPRQTYPIIARRS |
| 181 | GLLRASSVWGRKYYVDLAGCAKA |
| 182 | SIITMTKEAKLPQSWKQIACRLYNTC |
| 183 | AALRGALRAVARVGKAILPHVAIANPYVRTPYVHNNP |
| 184 | VRRFPWWWPFLRR |
| 185 | RRRFPWVCWPFLRRR |
| 186 | RFPWWWPFLR |
| 187 | FPWWWPF |
| 188 | KWKLFKKIGIGKFLHSAKKF |
| 189 | KWKLFKKIPKFLHSAKKF |
| 190 | KLKLFKKIGIGKFLHSAKKF |
| 191 | KAKLFKKIGIGKFLHSAKKF |
| 192 | INLKAIAALAKKLLG |
| 193 | INLKAIAAMAKKLL |
| 194 | APIIRRIPYYPEVESDLRIVDCKRSEGFCQEYCNYLETQVGYCSKKKDACCLH |
| 196 | RSVCRQIKICRRRGGCYYKCTNRPY |
| 197 | XNLRRIIRKIIHIIKKYG |
| 198 | XNLRRIIRKGIHIIKKYG |
| 199 | XNLRRITRKIIHIIKKYG |
| 200 | FIGPIISALASLFG |
| 201 | FLSLALAALPKFLCLVFKKC |
| 202 | FLSLALAALPKLFCLIFKKC |
| 203 | FLPLLLAGLPKLLCLFFKKC |
| 204 | GLFDVVKGVLKGAGKNVAGSLLEQLKCKLSGGC |
| 205 | GIFDVVKGVLKGVGKNVAGSLLEQLKCKLSGGC |
| 206 | GLFSVVTGVLKAVGKNVAKNVGGSLLEQLKCKISGGC |
| 207 | YVPLPNVPQPGRRPFPTFPGQGPFNPKIKWPQGY |
| 208 | QCIGNGGRCNENVGPPYCCSGFCLRQPGQGYGYCKNR |
| 209 | CIGNGGRCNENVGPPYCCSGFCLRQPNQGYGVCRNR |
| 210 | VGECVRGRCPSGMCCSQFGYCGKGPKYCGR |
| 211 | FALALKALKKALKKLKKALKKAL |
| 212 | LRDLVCYCRTRGCKRRERMNGTCRKGHLMYTLCCR |
| 213 | LRDLVCYCRKRGCKRRERMNGTCRKGHLMYTLCCR |
| 214 | VTCDLLSFKGQVNDSACAANCLSLGKAGGHCEKVGCICRKTSFKDLWDKYF |
| 215 | AMWKDVLKKIGTVALHAGKAALGAVADTISQ |
| 216 | LLGDFFRKSKEKIGKEFKRIVQRIKDFLRNLVPRTES |
| 217 | GRFKRFRKKFKKLFKKLSPVIPLLHLG |
| 218 | RIIDLLWRVRRPQKPKFVTVWVR |
| 219 | GRFRRLRKKTRKRLKKIGKVLKWIPPIVGSIPLGCG |
| 220 | GLLSRLRDFLSDRGRRLGEKIERIGQKIKDLSEFFQS |
| 221 | RRRPRPPYLPRPRPPPFFPPRLPPRIPPGFPPRFPPRFP |
| 222 | DLRFLYPRGKLPVPTPPPFNPKPIYIDMGNRY |
| 223 | VCGETCVGGTCNTPGCTCSWPVCTRNGLP |
| 224 | GIPCGESCVWIPCISAALGCSCKNKVCYRN |
| 225 | SIPCGESCVFIPCTVTALLGCSCKSKVCYKN |
| 226 | GVIPCGESCVFIPCISTLLGCSCKNKVCYRN |
| 227 | FFHHIFRGIVHVGKTIHKLVTGG |
| 228 | FFHHIFRGIVHVGKTIHRLVTGG |
| 229 | FFHHIFRGIVHVGRTIHKLVTGG |
| 230 | FFHHIFRGIVHVGRTIHRLVTGG |
| 232 | GWKDWAKKAGGWLKKKGPGMAKAALKAAMQ |
| 233 | GWKDWLKKGKEWLKAKGPGIVKAALQAATQ |
| 234 | GWKDWLNKGKEWLKKKGPGIMKAALKAATQ |
| 235 | DFKDWMKTAGEWLKKKGPGILKAAMAAAT |
| 236 | GLKDWVKIAGGWLKKKGPGILKAAMAAATQ |
| 237 | GLVDVLGKVGGLIKKLLP |
| 238 | GLVDVLGKVGGLIKKLLPG |
| 239 | LLKELWTKMKGAGKAVLGKIKGLL |
| 240 | LLKELWTKIKGAGKAVLGKIKGLL |
| 241 | WLGSALKIGAKLLPSVVGLFKKKKQ |
| 242 | WLGSALKIGAKLLPSVVGLFQKKKK |
| 243 | GIWGTLAKIGIKAVPRVISMLKKKKQ |
| 244 | GIWGTALKWGVKLLPKLVGMAQTKKQ |
| 245 | FWGALIKGAAKLIPSVVGLFKKKQ |
| 246 | FIGTALGIASAIPAIVKLFK |
| 247 | LLPNLLKSLL |
| 248 | FVQWFSKFLGRIL |
| 249 | GLFDIIKKIAESI |
| 250 | GLFDIIKKIAESF |
| 251 | FDIVKKVVGALGSL |
| 252 | GLFDIVKKVVGAIGSL |
| 253 | FDIVKKVVGTIAGL |
| 254 | GLFDIAKKVIGVIGSL |
| 255 | GLFDIVKKIAGHIVSSI |
| 256 | GLFGVLAKVAAHVVPAIAEHF |
| 257 | GLFGVLAKVASHVVPAIAEHFQA |
| 258 | KTCEHLADTYRGVCFTNASCDDHCKNKAHLISGTCHNWKCFCTQNC |
| 259 | KTCENLSGTFKGPCIPDGNCNKHCRNNEHLLSGRCRDDFRCWCTNRC |
| 260 | SSLLEKGLDGAKKAVGGLGKLGKDAVEDLESVGKGAVHDVKDVLDSV |
| 261 | ZCRRLCYKQRCVTYCRGR |
| 262 | GCRFCCNCCPNMSGCGVCCRF |
| 263 | SKGKKANKDVELARG |
| 264 | GLNTLKKVFQGLHEAIKLINNHVQ |
| 265 | GLNALKKVFQGIHEAIKLINNHVQ |
| 266 | GINTLKKVIQGLHEVIKLVSNHE |
| 267 | GINTLKKVIQGLHEVIKLVSNHA |
| 269 | FRGLAKLLKIGLKSFARVLKKVLPKAAKAGKALAKSMADENAIRQQNQ |
| 270 | GKFSVFGKILRSIAKVFKGVGKVRKQFKTASDLDKNQ |
| 271 | GKFSGFAKILKSIAKFFKGVGKVRKQFKEASDLDKNQ |
| 272 | GKLSGISKVLRAIAKFFKGVGKARKQFKEASDLDKNQ |
| 273 | GKFSVFSKILRSIAKVFKGVGKVRKQFKTASDLDKNQ |
| 274 | RWKLFKKIEKVGRNVRDGLIKAGPAIAVIGQAKSL |
| 275 | RWKIFKKIEKMGRNIRDGIVKAGPAIEVLGSAKAI |
| 276 | GVLSNVIGYLKKLGTGALNAVLKQ |
| 277 | ILPWKWPWWPWRR |
| 278 | SHQDCYEALHKCMASHSKPFSCSMKFHMCLQQQ |
| 279 | GIGTKILGGVKTALKGALKELASTYAN |
| 280 | ILGPVISTIGGVLGGLLKNL |
| 281 | GIGTKILGGVKTALKGALKELASTYVN |
| 282 | GIGGKILSGLKTALKGAAKELASTYLH |
| 283 | ILGPVLSMVGSALGGLIKKI |
| 284 | GIGGVLLSAGKAALKGLAKVLAEKYAN |
| 285 | ILGPVLGLVGNALGGLIKKI |
| 286 | SIGAKILGGVKTLLKGALKELASTYLQ |
| 287 | GLLNTFKDWAISIAKGAGKGVLTTLSCKLDKSC |
| 288 | SLFSLIKAGAKFLGKNLLKQGAQYAACKVSKEC |
| 289 | GILDSFKQFAKGVGKDLIKGAAQGVLSTMSCKLAKTC |
| 290 | LLPIVGNLLKSLL |
| 291 | VTCDILSVEAKGVKLNDAACAAHCLFRGRSGGYCNGKRVCVCR |
| 292 | SLGGVISGAKKVAKVAIPIGKAVLPVVAKLVG |
| 293 | HRHQGPIFDTRPSPFNPNQPRPGPIY |
| 294 | GSKKPVPIIYCNRRTGKCQRM |
| 295 | VTCYCRSTRCGFRERLSGACGYRGRIYRLCCR |
| 296 | GICRCICGRRICRCICGR |
| 297 | RYICRCICGRGICRCICG |
| 298 | GICRCICGRYICRCICGR |
| 299 | GICYCICGKGICRCICGR |
| 300 | RXICGXXIC |
| 301 | GVCRCICGRGVCRCICGR |
| 302 | GVCRCICGRGVCRCICRR |
| 303 | GICRCICGRRICRCICGK |
| 304 | GICKCICGRRICRCICGR |
| 305 | GICRCICGRRICKCICGR |
| 306 | GICRCICGRKICRCICGR |
| 307 | GICRCICGKKICRCICGR |
| 308 | GICRCICGKRICRCICGR |
| 309 | GICKCICGKGICKCICGR |
| 310 | GICRCICGKGICRCYCGR |
| 311 | VTPAMRTFALLTAMLLLVALAQAEPLQARADEAAAQEQPGADDQEMAHAFT |
| | WHESAALPLSSDSARGLRCICGRGICRLLRRFGSCAFRGTLHRICCRACRIKKH |
| | KLRIYFESKKFLLLLYLVLHFLFSSKINTLLQDFSL |
| 312 | VTPAMRTFALLTAMLLLVALAQAEPLQARADEAAAQEQPGADDQEMAHAFT |
| | WHESAALPLSSDSARGLRCICGRRICRLLRRFGSCAFRGTLHRICCRACRIKKH |
| | KLRIYFESKKFLLLLYLVLHFLFSSKINTLLQDFS |
| 313 | VTPAMRTFALLTAMLLLVALAQAEPLQARADEAAAQEQSDSARGLRCICGRG |
| | ICRLLRRFGSCAFRGTLHRVCCRTCRIKKNKLRIYFESKKFLLLLYLVLHFLFSS |
| | KINTLLQDFSL |
| 314 | RCLCVLRIC |
| 315 | RCLCVLRVC |
| 316 | RCLCTLRIC |
| 317 | RCLCTLRVC |
| 318 | RCLCGLRIC |
| 319 | RCLCGLRVC |
| 320 | RCICVLRFC |
| 321 | RCICVLRVC |
| 322 | RCICTLRFC |
| 323 | RCICTLRVC |
| 324 | RCICRLRFC |
| 325 | RCICRLRVC |
| 326 | RCICGRRIC |
| 327 | RCLCVRRVC |
| 328 | RCLCTRRFC |
| 329 | RCLCGRRVC |
| 330 | RCLCRRRFC |
| 331 | RCLCRRRVC |
| 332 | RCLCRLRIC |
| 333 | RCICGLRVC |
| 334 | RCICGLRFC |
| 335 | RCICGRRFC |
| 336 | RCICVRRVC |
| 337 | RCICRLRIC |
| 338 | RCICTLRIC |
| 339 | RCICTRRFC |
| 340 | RCICTRRVC |
| 341 | RCICRRRFC |
| 342 | RCICRRRVC |
| 343 | RCLCGRRFC |
| 344 | RCLCVRRIC |
| 345 | RCLCTRRIC |
| 346 | RCICGRRVC |
| 347 | RCICGLRIC |
| 348 | RCICVRRIC |
| 349 | RCICTRRIC |
| 350 | RCICRRRIC |
| 351 | RCLCGRRIC |
| 352 | VTPAMRTFALLTAMLLLVALHAQAEARQARADEAAAQQQPGADDQGMAHS |
| | FTRPENAALPLSESARGLRCICRRGVCQLLRRLGSCAFRGLCRICCRASRIKKN |
| | TLRSYFESXKKFLLLLYLVLNFLFSSQINTFSQDFCL |
| 353 | VTPAMRTFALLTAMLLLVALHAQAEARQARADEAAAQQQPGADDQGMAHS |
| | FTRPENAALPLSESARGLRCLCRRGVCQLLRRLGSCAFRGLCRICCRASRIKKN |
| | TLRSYFESXKKFLLLLYLVLNFLFSSQINTFSQDFCL |
| 354 | VTPAMRTFALLTAMLLLVALAQAEPLQARADEAAAQEQPGADDQEMAHAFT |
| | WDESAALPLSDSARGLRCIGGRGICGLLQRRVGSCAFRGTLHRICCRACRIKK |
| | NKLRIYSESKKFLLLLYLVLHFLFSSKINTSLQDFSL |
| 355 | VTPAMRTFALLTAMLLLVALAQAEPLQARADEAAAQEQPGADDQEMAHAFT |
| | WDESAALPLSDSARGLRCIGGRGICGLLQRRFGSCAFRGTLHRICCRACRIKKN |
| | KLRIYSESKKFLLLLYLVLHFLFSSKINTLLQDFSL |
| 356 | VTPAMRTFALLTAMLLLVDLAQAEPLQARADEAAAQEQPGADDQEMAHAFT |
| | WDESAALPLSDSARGLRCICGRGICRLLRRFGSCAFRGTLHRICCRACRIKKNK |
| | LRIYFETKKFLLLLYLVLHFLFSSKINTLLQDFCL |
| 357 | VTPAMRTFTVLAAMLLVVALQAQAEPLRARADETAAQEQPGADDQEMAHAF |
| | TWDESAALPLSDSARGLRCICRRGVCRLLRHFGSCAFRGTLHRICCRACRIKK |
| | NKLRIYFESKKFLFLLYLALHFLFSSKINTLLQDFCL |
| 358 | VTPAMRTFTVLAAMLLVVALQAQAEPLRARADETAAQEQPGADDQEMAHAF |
| | TWDESAALPLSDSARGLRCICRRGVCRFLRHLGSCAFRGTLHRICCRACRIKK |
| | NKLRIYFESKKFVFLLYLALHFLFSSKINTLLQDFCL |
| 359 | VTPAMRTFALLAAMLLLVALAEAEPLQARADETAAQEQPGADDQEMAHAFT |
| | WDESATLPLSDSARGLRCICRRGVCRFLRHLGSCAFRGTLHRICCRACRIKKN |
| | KLRIYFESKKFVFLLYLALHFLFSSKINTLLQDFCL |
| 360 | VTPAMRTFALLTAMLLLVALAQAEPLQARADEAAAQEQPGADDQEMAHAFT |
| | WHESAALPLSDSARGLRCICGRGICRLLRRFGSCAFRGTLHRICCRACRIKKHK |
| | LRIYFESKKFLLLLYLVLHFLFSSKINTLLQDFSL |
| 361 | RCLCVLGIC |
| 362 | RCLCVLGVC |
| 363 | RCLCTLGIC |
| 364 | RCLCTLGVC |
| 365 | RCLCGLGIC |
| 366 | RCLCGLGVC |
| 367 | RCICVLGFC |
| 368 | RCICVLGVC |
| 369 | RCICTLGFC |
| 370 | RCICTLGVC |
| 371 | RCICRLGFC |
| 372 | RCICRLGVC |
| 373 | RCICGRGIC |
| 374 | RCLCVRGVC |
| 375 | RCLCTRGFC |
| 376 | RCLCTRGVC |
| 377 | RCLCRRGFC |
| 378 | RCLCRRGVC |
| 379 | RCLCRLGIC |
| 380 | RCICGLGVC |
| 381 | RCICGLGFC |
| 382 | RCICGRGFC |
| 383 | RCICVRGVC |
| 384 | RCICRLGIC |
| 385 | RCICTLGIC |
| 386 | RCICTRGFC |
| 387 | RCICTRGVC |
| 388 | RCICRRGFC |
| 389 | RCICRRGVC |
| 390 | RCLCGRGFC |
| 391 | RCLCGRGVC |
| 392 | RCLCVRGIC |
| 393 | RCLCTRGIC |
| 394 | RCICGRGVC |
| 395 | RCICGLGIC |
| 396 | RCICVRGIC |
| 397 | RCICTRGIC |
| 398 | RCICRRGIC |
| 399 | RCLCGRGIC |
| 400 | MRTFALLTAMLLLVALHAQAEARQARADEAAAQQQPGADDQGMAHSFTRP |
| | ENAALPLSESARGLRCLCRRGVCQLL |
| 401 | MRTFALLTAMLLLVALHAQAEARQARADEAAAQQQPGTDDQGMAHSFTWP |
| | ENAALPLSESAKGLRCICTRGFCRLL |
| 402 | MRIIALLAAILLVALQVRAGPLQARGDEAPGQEQRGPEDQDISISFAWDKSSAL |
| | QVSGSTRGMVCSCRLVFCRRTELRVGNCLIGGVSFTYCCTRVD |
| 403 | AQAEPLQARADEAAAQEQPGADDQEMAHAFTWHESAALPLSDSARGLRCIC |
| | GRGICRLL |
| 404 | RGCICRCIGRGCICRCIG |
| 405 | GICICICGRGICYCICGR |
| 406 | GICICICGYGICRCICGR |
| 407 | GICYCICGRGICRCICGR |
| 408 | GICRCICGRGYCRCICGR |
| 409 | GYCRCICGRGICRCICGR |
| 410 | GICRCICGRGICRCYCGR |
| 411 | GICRCYCGRGICRCICGR |
| 412 | GICRCICGKGICRCICGR |
| 413 | GICRCICGRGICRCICGR |
| 414 | VPKCCKPV |
| 415 | CKPV |
| 416 | SYSMEHFRWGKPV |
| 417 | HFRWGKPV |
| 418 | MEHFRWG |
| 419 | MAKSYGAIFLLTLIVLFMLQTMYMASSGSNVKWRQKRVGPGSLKRTQCPSEC |
| | DRRCKKTQYHKACITFCNKCCRKCLCVPPGYYGNKQVCSCYNNWKTQEGGP |
| | KCP |
| 420 | CDGKCKVRCSKASRHDDCLKYCGVCCASCNCVPSGTAGNKDECPCYRDMTT |
| | GHGARKRP |
| 421 | ADVENSQKKNGYAKKIDCGSACVARCRLSRRPRLCHRACGTCCYRCNCVPPG |
| | TYGNYDKCQCYASLTTHGGRRKCP |
| 422 | MVRCSLSSRPNLCHRACGTCCARCNCVAPGTSGNYDKCPCYGSLTTHGGRRK |
| | EV |
| 423 | QSKDGPALEKWCGQKCEGRCKEAGMKDRCLKYCGICCKDCQCVPSGTYGNK |
| | HECACYRDKLSSKGTPKCP |
| 424 | EQKQGQYGEGSLRPSECGQRCSYRCSATSHKKPCMFFCQKCCAKCLCVPPGT |
| | FGNKQVCPCYNNWKTQQGGPKCP |
| 425 | CGGKCNVRCSKAGQHEECLKYCNICCQKCNCVPSGTFGHKDECPCYRDMKN |
| | SKGGSKCP |
| 426 | YEFREIKFFFLCVYVQGDELESQAQAPAIHKNGGEGSLKPEECPKACEYRCSAT |
| | SHRKPCLFFCNKCCNKCLCVPSGTYGHKEECPCYNNWTTKEGGPKCP |
| 427 | LVTSASKGSSFPKKIDCGGACAARCQLSSRPHLCKRACGTCCARSRCVPPGTA |
| | GNQEMCPCYASLTTHGGKRKCP |
| 428 | MMISLLVFNPVEADGVVVNYGQHASLLAKIDCGGACKARCRLSSRPHLCKRA |
| | CGTCCQRCSCVPPGTAGNYDVCPCYATLTTHGGKRKCP |
| 429 | LVTSAGKGNSSPKKIDCGGACAARCQLSSRPHLCKRACGTCCARCACVPPGT |
| | AGNQEMCPKCYASLTTHGGKRKCP |
| 430 | GSLHPQDCQPKCTYRCSKTSFKKPCMFFCQKCCAKCLCVPAGTYGNKQTCPC |
| | YNNWKTKEGGPKCP |
| 431 | ADVESSQKKNGYAKKIDCGSACVARCRLSRRPRLCHRACGTCCYRCNCVPPG |
| | TYGNYDKCQCYASLTTHGGRRKCP |
| 432 | YELHVHAADGAKVGEGVVKIDCGGRCKDRCSKSSRTKLCLRACNSCCSRCNC |
| | VPPGTSGNTHLCPCYASITTHGGRLKCP |
| 433 | AAEDSQVGEGVVKIDCGGRCKGRCSKSSRPNLCLRACNSCCYRCNCVPPGTA |
| | GNHHLCPCYASITTRGGRLKCP |
| 434 | GRLHPQDCQPKCTYRCSKTSYKKPCMFFCQKCCAKCLCVPAGTYGNKQSCPC |
| | YNNWKTKRGGPKCP |
| 435 | SVSNLVQAARGGGKLKPQQCNSKCSYRCSATSHKKPCMFFCLKCCKKCLCVP |
| | PGTFGNKQTCPCYNNWKTKEGRPKCP |
| 436 | IFLLTLIVLFMLQTMVMASSGSNVKWRQKRYGPGSLKRTQCPSECDRRCKKT |
| | QYHKACITFCNKCCRKCLCVPPGYYGNKQVCSCYNNWKTQEGGPKCP |
| 437 | IFLLTLIVLFMLQTMVMASSGSNVKWSQKRYGPGSLKRTQCPSECDRRCKKT |
| | QYHKACITFCNKCCRKCLCVPPGYYGNKQVCSCYNNWKTQEGGPKCP |
| 438 | LRPTDCKPRCTYRCSATSHKKPCMFFCQKCCATCLCVPKGVYGNKQSCPCYN |
| | NWKTQEGKPKCP |
| 439 | KSYQCGGQCTRRCSNTKYHKPCMFFCQKCCAKCLCVPPGTYGNKQVCPCYN |
| | NWKTQQGGPKCP |
| 440 | SKINCGAACKARCRLSSRPNLCHRACGTCCARCRCVPPGTSGNQKVCPCYYN |
| | MTTHGGRRKCP |
| 441 | MKLFLLTLLLVTLVITPSLIQTTMAGSNFCDSKCKLRCSKAGLADRCLKYCGV |
| | CCEECKCVPSGTYGNKHECPCYRDKKNSKGKSKCP |
| 442 | HEVQHIDCNAACAARCRLASRQRMCHRACGTCCRRCNCVPPGTSGNQEVCP |
| | CYASLATHGGRRKCP |
| 443 | MAARSYSPIMVALSLLLLVTFSNVAEAYTRSGTLRPSDCKPKCTYRCSATSHK |
| | KPCMFFCQKCCAKCLCVPPGTYGNKQICPCYNSWKTKEGGPKCP |
| 444 | MAMAKVFCVLLLALLGISMITTQVMATDSAYHLDGRNYGPGSLKSSQCPSEC |
| | TRRCSQTQYHKPCMVFCKQCCKRCLCVPPGYYGNKSVCPCYNNWKTKRGGP |
| | KCP |
| 445 | MAVANKLLSVLIIALIAISMLQTVVMASHGHGGHHYNDKKKYGPGSLKSFQC |
| | PSQCSRRCGKTQYHKPCMFFCQKCCRKCLCVPPGYYGNKAVCPCYNNWKTK |
| | EGGPKCP |
| 446 | MAKFFAAMILALIAISMLQTVVMAANEQGGHLYDNKSKYGSGSVKRYQCPS |
| | QCSRRCSQTQYHKPCMFFCQKCCRKCLCVPPGYYGNKAVCPCYNNWKTKEG |
| | GPKCP |
| 447 | MAKFFAAMILALFAISILQTVVMAANEQGGHLYDNKSKYGSGSVKSYQCPSQ |
| | CSRRCSQTQYHKPCMFFCQKCCRTCLCVPPGYYGNKAVCPCYNNWKTKEGG |
| | PKCP |
| 448 | MASNSILLLCIFLVVATKVFSYDEDLKTVVPAPAPPVKAPTLAPPVKSPSYPPG |
| | PVTTPTVPTPTVKVPPPPQSPVVKPPTPTVPPPTVKVPPPPQSPVVKPPTPTPTSP |
| | VVYPPPVAPSPPAPVVKSNKDCIPLCDYRCSLHSRKKLCMRACITCCDRCKCV |
| | PPGTYGNREKCGKCYTDMLTHGNKFKCP |
| 449 | MEKKRKTLLLLLLMAATLFCMPIVSYAVSSVNIQGHLTHSELVKGPNRRLLPF |
| | VDCGARCRVRCSLHSRPKICSRACGTCCFRCRCVPPGTYGNREMCGKCYTDM |
| | ITHGNKPKCP |
| 450 | MALSKLIIASLLASLLLLHFVDADQSAHAQTQGSLLQQIDCNGACAARCRLSS |
| | RPRLCQRACGTCCRRCNCVPPGTAGNQEVCPCYASLTTHGGKRKCP |
| 451 | MALRVLLVLGMLLMLCLVKVSSDPKIEEEILEAEEELQFPDNEPLIVRDANRRL |
| | MQDMDCGGLCKTRCSAHSRPNLCTRACGTCCVRCKCVPPGTSGNRELCGTC |
| | YTDMTTHGNKTKCP |
| 452 | MAPRVFLVLGMLLMVCLVKVSSDPKREEEILEEELHFPDNEPLIVRDGNRRLM |
| | QDIDCGGLCKTRCSAHSRPNLCTRACGTCCVRCKCVPPGTSGNRELCGTCYTD |
| | MTTHGNKTKCP |
| 453 | MMGILLLVCLAKVSSDVNMQKEEDEELRFPNHPLIVRDGNRRLMQDIDCGGL |
| | CKTRCSAHSRPNVCNRACGTCCVRCKCVPPGTSGNRELCGTCYTDMITHGNK |
| | TKCP |
| 454 | MKLVFATLLLCSLLLSSSFLEPVIAYEDSSYCSNKCSDRCSSAGVKDRCLRYCG |
| | ICCAECKCVPSGTYGNKHQCPCYRDKLNKKGKPKCP |
| 455 | MKLEFANVLLLCLVLSSSFLEISMAGSPFCDSKCAQRCAKAGVQDRCLRFCGI |
| | CCEKCNCVPSGTYGNKDECPCYRDMKNSKGKDKCP |
| 456 | MAPGKLAVFALLASLLLLNTIKAADYPPAPPLGPPPHKIVDPGKDCVGACDAR |
| | CSEHSHKKRCSRSCLTCCSACRCVPAGTAGNRETCGRCYTDWVSHNNMTKCP |
| 457 | MLLLALAAHHQAASDPPATHGGMRASGTRSLLQQQPPPPRLDCPKVCAGRCA |
| | NNWRKEMCNDKCNVCCQRCNCVPPGTGQDTRHICPCYATMTNPHNGKLKCP |
| 458 | MVTKVICFLVLASVLLAVAFPVSALRQQVKKGGGGEGGGGGSVSGSGGGNL |
| | NPWECSPKCGSRCSKTQYRKACLTLCNKCCAKCLCVPPGFYGNKGACPCYNN |
| | WKTREGGPKCP |
| 459 | MSKPSRCRAVQTQVALLLLLLVAASLLQAGDAASGFCAGKCAVRCGRSRAK |
| | RGACMKYCGLCCXECACVPTGRSGSRDECPCYRDMLTAGPRKRPKCP |
| 460 | MKPLPVTLALLALFLVASYQDLTVAADADADAAGAGDVGAVPVPDSVCEGK |
| | CKNRCSQKVAGRCMGLCMMCCGKCAGCVPSGPLAPKDECPCYRDMKSPKS |
| | GRPKCP |
| 461 | MKKLRTTTATTTLALILLLVLIAATSLRVAMAGSAFCDSKCGVRCSKAGRHD |
| | DCLKYCGICCAECNCVPSGTAGNKDECPCYRDKTTGHGARTRPKCP |
| 462 | MKKLRTTTLALLLLLVFLAASSLRAAMAGSAFCDGKCGVRCSKASRHDDCLK |
| | YCGICCAECNCVPSGTAGNKDECPCYRDKTTGHGARKRPKCP |
| 463 | MGGGNGGAGGGGKLKPWECSSKCSSRCSGTQYKKACLTYCNKCCATCLCVP |
| | PGTYGNKGACPCYNNWKTKEGGPKCP |
| 464 | MESKSPWSLRLLICCAAMVAIALLPQQGGQAACFVPTPGPAPAPPGSSATNTN |
| | ASSAAPRPAKPSAFPPPMYGGVTPGTGSLQPHECGGRCAERCSATAYQKPCLF |
| | FCRKCCAACLCVPPGTYGNKNTCPCYNNWKTKRGMYGGVTPGTGSLQPHEC |
| | GGRCAERCSATAYQKPCLFFCRKCCAACLCVPPGTYGNKNTCPCYNNWKTK |
| | RGGPKCP |
| 465 | MAKASSRLLFSLSLVVLLLLVETTTSPHGQADAIDCGASCSYRCSKSGRPKMC |
| | LRACGTCCQRCGCVPPGTSGNEDVCPCYANMKTHDGQHKCP |
| 466 | MKAIPVALLLLVLVAAASSFKHLAEAADGGAVPDGVCDGKCRSRCSLKKAG |
| | RCMGLCMMCCGKCQGCVPSGPYASKDECPCYRDMKSPKNQRPKCP |
| 467 | MMTTMKKKKQQQQLLLLSLMFLVAVTAAAVAADPHPQQVQVQQQQQAQM |
| | RINRATRSLLPQPPPKLDCPSTCSVRCGNNWKNQMCNKMCNVCCNKCSCVPP |
| | GTGQDTRHLCPCYDTMLNPHTGKLKCP |
| 468 | MAVAKPPLQTAAVLLLLLLVVAAASWLQTVDAASGFCSSKCSVRCGRAASA |
| | RARGACMRSCGLCCEECNCVPTRPPRDVNECPCYRDMLTAGPRKRPKCP |
| 469 | MAPSKLAVVVALVASLLLLTTSNTKLGLFVLGQAAPGAYPPRAPPPHQIVDLA |
| | KDCGGACDVRCGAHSRKNICTRACLKCCGVCRCVPAGTAGNQQTCGKCYTD |
| | WTTHGNKTKCP |
| 470 | MKLQATARVAGLLFLVLLLALPSLRVSMAGSGFCDGKCAVRCSKASRHDDCL |
| | KYCGICCATCNCVPSGTAGNKDECPCYRDMTTGHGNRTRPKCP |
| 471 | MVTKVICFLVLASVLLAVAFPVSALRQQVKKGGGGEGGGGGSVSGSGGGNL |
| | NPWECSPKCGSRCSKTQYRKACLTLCNKCCAKCLCVPPGFYGNKGACPCYNN |
| | WKTKEGGPKCP |
| 472 | MNNLHRELAPIASAAWEQIEEEVARTFKRSVAGRRVVDVEGPKGPALSAVGT |
| | GHLRDVDAPREQVSARLREVRAIVELTVPFELSRDAIDSVERGARDADWQPA |
| | KDAAQRLAFAEDHAIFDGYAAAGIIGIREGSSNRRLTLPDDVGAYPDAISDALE |
| | ALRLAGVDGPYSVLLGADAYTALSEARDQGYPVIDHIKRIVSGEIIWAPAISGG |
| | CVLSTRGGDYELHLGEDVSIGYTSHTDKVVRLYLRETFTFLML |
| 473 | MNNLHRELAPISSAAWEQIEEEVARTFKRSVAGRRVVDVEGPAGPELSAVGT |
| | GHLLDVAAPRELVNARLREVRTIVELTVPFELSRDAIDSVERGARDADWQPAK |
| | EAAQRLAFAEDNAIFDGYPAAGIVGIREGTSNRRLTLPADVGAYPDAISDALE |
| | ALRLAGVDGPYSVVLGSDAYTALSEARDQGYPVLGHIKRIVSGEIIWAPAISGG |
| | CVLSTRGGDYELHLGEDVSIGYTSHTDKGVRLYLRETFTFLML |
| 474 | KFAKKAAKKFAKKAAK |
| 475 | KFAKKFAKKAAKKAAK |
| 476 | KFAKKFAKKFAKKAAK |
| 477 | FKLRAKIKVRLRAKIKL |
| 478 | FAKKFAKKFKKFAKKFAKFAFAF |
| 479 | KGKKGKKGKKGKKGKKGKKGK |
| 480 | KFKKFKKFKKFK |
| 481 | KFKKFKKFK |
| 482 | KFAKKFAKKFAKKFAKKFAKKFAKKFAKKFAKKFAKKFAKKFAKKFAKKFA |
| | KKFAKKFAKKFAKKFAKKFAKKFAKKFAK |
| 483 | LKLKLKLKLKLKLK |
| 484 | KFAKKFAKKFAK |
| 485 | KFAKKFAK |
| 486 | KFAK |
| 487 | KTKKTKKTKKTKKTKKTKKTK |
| 488 | KGKKGKKGKKGKKGKKGKKGKKGKKGKKGKKGKKGKKGKKGKKGK |
| 489 | KGKKGKKGKKGKKGKKGKKGKKGKKGKKGKKGK |
| 490 | LRLRLRLRLRLRLRLRLRLRLR |
| 491 | LRLRLRLRLRLRLRLRLR |
| 492 | LRLRLRLRLRLRLR |
| 493 | LKLKLKLKLKLKLKLKLKLKLKLKLKLKLKLKLKLKLKLKLKLKLKLK |
| 494 | LKLKLKLKLKLKLKLKLKLKLKLKLKLKLKLKLKLK |
| 495 | LKLKLKLKLKLKLKLKLKLKLKLK |
| 496 | LKLKLKLKLKLKLKLKLKLKLK |
| 497 | LKLKLKLKLKLKLKLKLKLK |
| 498 | LKLKLKLKLKLKLKLKLK |
| 499 | LKLKLKLKLKLKLKLK |
| 500 | LKLKLKLKLK |
| 501 | LKLK |
| 502 | FKAFKAFKAFKAFKAFKAFKAFKAFKAFKAFKAFKAFKAFKAFKAFKAFKAF |
| | KAFKAFKAFKA |
| 503 | FKAFKAFKAFKAFKAFKAFKAFKAFKAFKAFKAFKAFKAFKAFKAFKAFKA |
| 504 | FKAFKAFKAFKAFKAFKAFKAFKAFKAFKA |
| 505 | FKAFKAFKAFKAFKAFKAFKAFKAFKA |
| 506 | FKAFKAFKAFKAFKAFKAFKAFKA |
| 507 | FKAFKAFKAFKAFKAFKAFKA |
| 508 | FKAFKAFKAFKAFKAFKA |
| 509 | FKAFKAFKAFKA |
| 510 | FKAFKA |
| 511 | KFKKFKKFKKFKKFKKFKKFKKFKKFKKFKKFKKFKKFKKFKKFKKFKKFKK |
| | FKKFKKFKKFK |
| 512 | KFKKFKKFKKFKKFKKFKKFKKFKKFKKFKKFKKFKKFKKFKKFKKFK |
| 513 | KFKKFKKFKKFKKFKKFKKFKKFKKFKKFKKFKKFK |
| 514 | KFKKFKKFKKFKKFKKFKKFKKFKKFKKFK |
| 515 | KFKKFKKFKKFKKFKKFKKFKKFKKFK |
| 516 | KFKKFKKFKKFKKFKKFKKFKKFK |
| 517 | KFKKFKKFKKFKKFKKFKKFK |
| 518 | KFKKFKKFKKFKKFKKFK |
| 519 | KFKKFKKFKKFKKFK |
| 520 | KKAKKKAKKKAKKKAKKKAKKKAKKKAK |
| 521 | KAAKKAAKKAAKKAAKKAAKKAAKKAAK |
| 522 | KFAKKFAKKFAKKFAKKFAKKFAKKFAK |
| 523 | KFFKKFFKKFFKKFFKKFFKKFFKKFFK |
| 524 | KFAFKFAFKFAFKFAFKFAFKFAFKFAF |
| 525 | LKKLLKKLLKKLLKKLLKKLLKKLLKKLLKKL |
| 526 | LKKLLKKLLKKLLKKLLKKLLKKLLKKL |
| 527 | LKKLLKKLLKKLLKKLLKKLLKKL |
| 528 | LKKLLKKLLKKLLKKLLKKL |
| 529 | KKFAKKFAKKFAKKFAKKFAKKFA |
| 530 | AKKFAKKFAKKFAKKFAKKFAKKF |
| 531 | FAKKFAKKFAKKFAKKFAKKFAKK |
| 532 | RFARRFARRFARRFARRFARRFARRFARRFAR |
| 533 | RFARRFARRFARRFARRFARRFARRFAR |
| 534 | RFARRFARRFARRFARRFARRFAR |
| 535 | KFAKKFAKKFAKKFAKKFAKKFAKKFAKKFAKKFAKKFAKKFAKKFAKKFA |
| | KKFAKKFAKKFAKKFAKKFAKKFAKKFAKKFAK |
| 536 | KFAKKFAKKFAKKFAKKFAKKFAKKFAKKFAKKFAKKFAKKFAKKFAKKFA |
| | KKFAKKFAKKFAKKFAK |
| 537 | KFAKKFAKKFAKKFAKKFAKKFAKKFAKKFAKKFAKKFAKKFAKKFAK |
| 538 | KFAKKFAKKFAKKFAKKFAKKFAKKFAKKFAK |
| 539 | KFAKKFAKKFAKKFAKKFAKKFAK |
| 540 | KFAKKFAKKFAKKFAKKFAK |
| 541 | KFAKKFAKKFAKKFAK |
| 542 | RIIRKIIHII |
| 543 | RIIRKIIHIIK |
| 544 | RRIIRKIIHII |
| 545 | NIRRIIRKIIHIIKKY |
| 546 | NLRRIIRKIIHIIKKY |
| 547 | RGLRALGRKIAHGVKAYG |
| 548 | KNLRRIIRKIIHIIKKYGPTILRIIRIIG |
| 549 | RGLRRLGRKIAHGVKKYGPTVLRIIRIA |
| 550 | KIKEKLKKIGQKIQGLL |
| 551 | KIKEKLKKIGQKIQG |
| 552 | RKFRNKIKEKLKKIG |
| 553 | LRKFRNKIKEKLKKIGQKIQG |
| 554 | LRKFRNKIKEKLKKIGQKI |
| 555 | RKRLRKFRNKIKEKLKKIGQKI |
| 556 | KRLRKFRNKIKEKLKKIG |
| 557 | GLRKRLRKFRNKIKEKLKKIG |
| 558 | GLRKRLRKFRNKIKEKLKKIGQKIQGLLPKLAPRTDY |
| 559 | RRIIRKIIHIIK |
| 560 | RRIIRKIIHIIKK |
| 561 | LRRIIRKIIHIIK |
| 562 | IRRIIRKIIHIIKK |
| 563 | LRRIIRKIIHIIKK |
| 564 | KNLRRIIRKIIHIIKKYG |
| 565 | KNIRRIIRKIIHIIKKYG |
| 566 | RGLRRLGRKIAHGVKKYG |
| 567 | LGRKIAHGVKKYGPTVLRII |
| 568 | KIAHGVKKYGPTVLRIIRIAG |
| 569 | RGLRRLGRKIAHGVKKYGPTVLRIIRIAG |
| 570 | HPHVCTSYYCSKFCGTAGCTRYGCRNLHRGKLCFCLHCSR |
| 571 | HSHACTSYWCGKFCGTASCTHYLCRVLHPGKMCACVHCSR |
| 572 | HXHXCTSYXCXKFCGTAXCTXYXCRXLHXGKXCXCXHCSR |
| 573 | MKATMLLAVVVAVFVAGTEAHPHVCTSYYCSKFCGTAGCTRYGCRNLHRGK |
| | LCFCLHCSRVKFPFGATQDAKSMNELEYTPIMKSMENLDNGMDML |
| 574 | MKATILLAVLVAVFVAGTEAHSHACTSYWCGKFCGTASCTHYLCRVLHPGK |
| | MCACVHCSRVNNPFRVNQVAKSINDLDYTPIMKSMENLDNGMDML |
| 575 | KWKLFKKIGIGAVLKVLTTGLPALKKTK |
| 576 | KWKLFKKIGIGAVLKVLTTGLPALIS |
| 577 | KKWWRRXXXGLKTAGPAIQSVLNK |
| 578 | KWKSFIKK |
| 579 | KKWWKX |
| 580 | KKWWRRX |
| 581 | KKWRKSFFKQVGSFDNSV |
| 582 | WKVFKSFIKKASSFAQSVLD |
| 583 | KKSFFKKLTSVASSVLS |
| 584 | KKWWKFIKKAVNSGTTGLQTLAS |
| 585 | KKWWKAKKFANSGPNALQTLAQ |
| 586 | KKWWKAQKAVNSGPNALQTLAQ |
| 587 | KKWWRRALQGLKTAGPAIQSVLNK |
| 588 | KKWWRRVLSGLKTAGPAIQSVLNK |
| 589 | KKWWRRALQALKNGPALSNV |
| 590 | KKWWRRVLKGLSSGPALSNV |
| 591 | KKWWRRVLSGLKTGPALSNV |
| 592 | KWKKFIKELQKVLKPGGLLSNIVTSL |
| 593 | KKKSFIKLLTSAKVSVLTTAKPLISS |
| 594 | KWKSFIKKLTSVLKKVVTTAKPLISS |
| 595 | KWKLFKKKGTGAVLTVLTTGLPALIS |
| 596 | KWKSFIKNLTKVLKKVVTTALPALIS |
| 597 | KWKSFIKKLTSVLKKVVTTALPALIS |
| 598 | KWKKFIKELQKVLAPGGLLSNIVTSL |
| 599 | KWKEFIKKLTTAVKKVLTTGLPALIS |
| 600 | KWKSFIKNLEKVLKKGPILANLVSIV |
| 601 | KWKSFIKNLEKVLKPGGLLSNIVTSL |
| 602 | KWKKFIKNLTKGGSKILTTGLPALIS |
| 603 | KWKSFIKNLTKGGSKILTTGLPALIS |
| 604 | KWKSFIKKLTSAAKKVVTTAKPLISS |
| 605 | KWKSFIKKLTTAVKKVLTTGLPALIS |
| 606 | RVVRVVRRWVRRVRRVWRRVVRVVRRWVRRVRRVWRRVVRVVRRWRVV |
| 607 | VRRVWRRVVRVVRRWVRRVRRVWRRVVRVVRRWVRR |
| 608 | RRWVRRVRRVWRRVVRVVRRWVRR |
| 609 | RVVRVVRRWVRR |
| 610 | RVVRVVRRVVRRVRRVVRRVVRVVRRVVRRVRRVVRRVVRVVRRVVRR |
| 611 | RRVVRRVRRVVRRVVRVVRRVVRRVRRVVRRVVRVVRRVVRR |
| 612 | VRRVVRRVVRVVRRVVRRVRRVVRRVVRVVRRVVRR |
| 613 | RRVVRRVRRVVRRVVRVVRRVVRR |
| 614 | RVVRVVRRVVRR |
| 615 | RWIRVVQRWCRAIRHIWRRIRQGLRRWLRVV |
| 616 | RVIRVVQRACRAIRHIVRRIRQGLRRILRVV |
| 617 | RVIRVVQRACRAIRHIVRRIRQGLRRIL |
| 618 | MQYNRR |
| 619 | FVNVVPTFGKKKGPNANS |
| 620 | TGRAKRR |
| 621 | AKVAKQEKKKKKTGRAKRRA |
| 622 | KVAKQEKKKKKTGRAKRR |
| 623 | KVAKQEKKKKKT |
| 624 | TGRAKRRMQYNRR |
| 625 | KVHGSLARAGKVRGQTPK |
| 626 | KVHGSLARAGKVRGQTPKVAKQEKKKKKTGRAKRRMQYNRRFVNVVPTFG |
| | KKKGPNANS |
| 627 | MKLNTTTTLALLLLLLLASSSLQVSMAGSDFCDGKCKVRCSKASRHDDCLKY |
| | CGVCCASCNCVPSGTAGNKDECPCYRDMTTGHGARKRPKCP |
| 628 | QSKDGPALEKWCGQKCEGRCKEAGMKDRCLKYCGICCKDCQCVPSGTYGNK |
| | HECACYRDKLSSKGTPKCP |
| 629 | SVSNLVQAARGGGKLKPQQCNSKCSYRCSATSHKKPCMFFCLKCCKKCLCVP |
| | PGTFGNKQTCPCYNNWKTKEGRPKCP |
| 630 | MAARSYSPIMVALSLLLLVTFSNVAEAYTRSGTLRPSDCKPKCTYRCSATSHK |
| | KPCMFFCQKCCAKCLCVPPGTYGNKQICPCYNSWKTKEGGPKCP |
| 631 | MAKEFFAAMILALIAISMLQTVVMAANEQGGHLYDNKSKYGSGSVKRYQCPS |
| | QCSRRCSQTQYHKPCMFFCQKCCRKCLCVPPGYYGNKAVCPCYNNWKTKEG |
| | GPKCP |
| 632 | MAKEFFAAMILALFAISLILQTVVMAANEQGGHLYDNKSKYGSGSVKSYQCPSQ |
| | CSRRCSQTQYHKPCMFFCQKCCRTCLCVPPGYYGNKAVCPCYNNWKTKEGG |
| | PKCP |
| 633 | MASNSILLLCIFLVVATKVFSYDEDLKTVVPAPAPPVKAPTLAPPVKSPSYPPG |
| | PVTTPTVPTPTVKVPPPPQSPVVKPPTPTVPPPTVKVPPPPQSPVVKPPTPTPTSP |
| | VVYPPPVAPSPPAPVVKSNKDCIPLCDYRCSLHSRKKLCMRACITCCDRCKCV |
| | PPGTYGNREKCGKCYTDMLTHGNKFKCP |
| 634 | MEKKRKTLLLLLLMAATLFCMPIVSYAVSSVNIQGHLTHSELVKGPNRRLLPF |
| | VDCGARCRVRCSLHSRPKICSRACGTCCFRCRCVPPGTYGNREMCGKCYTDM |
| | ITHGNKPKCP |
| 635 | MALSKLIIASLLASLLLLHFVDADQSAHAQTQGSLLQQIDCNGACAARCRLSS |
| | RPRLCQRACGTCCRRCNCVPPGTAGNQEVCPCYASLTTHGGKRKCP |
| 636 | MALRVLLVLGMLLMLCLVKVSSDPKIEEEILEAEEELQFPDNEPLIVRDANRRL |
| | MQDMDCGGLCKTRCSAHSRPNLCTRACGTCCVRCKCVPPGTSGNRELCGTC |
| | YTDMTTHGNKTKCP |
| 637 | MAPRVFLVLGMLLMVCLVKVSSDPKREEEILEEELHFPDNEPLIVRDGNRRLM |
| | QDIDCGGLCKTRCSAHSRPNLCTRACGTCCVRCKCVPPGTSGNRELCGTCYTD |
| | MTTHGNKTKCP |
| 638 | MMGILLLVCLAKVSSDVNMQKEEDEELRFPNHPLIVRDGNRRLMQDIDCGGL |
| | CKTRCSAHSRPNVCNRACGTCCVRCKCVPPGTSGNRELCGTCYTDMITHGNK |
| | TKCP |
| 639 | MAISKSTVVVVILCFILIQELGIYGEDPHMDAAKKIDCGGKCNSRCSKARRQK |
| | MCIRACNSCCKKCRCVPPGTSGNRDLCPCYARLTTHGGKLKCP |
| 640 | MKLVFGTLLLCSLLLSFSFLEPVIAYEDSSYCSNKCADRCSSAGVKDRCVKYC |
| | GICCAECKCVPSGTYGNKHECPCYRDKLNKKGKPKCP |
| 641 | MKLVFATLLLCSLLLSSSFLEPVIAYEDSSYCSNKCSDRCSSAGVKDRCLRYCG |
| | ICCAECKCVPSGTYGNKHQCPCYRDKLNKKGKPKCP |
| 642 | MKLEFANVLLLCLVLSSSFLEISMAGSPFCDSKCAQRCAKAGVQDRCLRFCGI |
| | CCEKCNCVPSGTYGNKDECPCYRDMKNSKGKDKCP |
| 643 | MKVAFAAVLLICLVLSSSLFEVSMAGSAFCSSKCSKRCSRAGMKDRCMKFCGI |
| | CCSKCNCVPSGTYGNKHECPCYRDMKNSKGKAKCP |
| 644 | MKVAFVAVLLICLVLSSSLFEVSMAGSAFCSSKCAKRCSRAGMKDRCTRFCGI |
| | CCSKCRCVPSGTYGNKHECPCYRDMKNSKGKPKCP |
| 645 | LRPWECSPKCAGRCSNTQYKKACLTFCNKCCAKCLCVPPGTYGNKGACPCY |
| | NNWKTKEGGPKCP |
| 646 | KDCVGACDARCSEHSHKKRCSRSCLTCCSACRCVPAGTAGNRETCGRCYTD |
| | WVSHNNMTKCP |
| 647 | MLLLALAAHHQAASDPPATHGGMRASGTRSLLQQQPPPPRLDCPKVCAGRCA |
| | NNWRKEMCNDKCNVCCQRCNCVPPGTGQDTRHICPCYATMTNPHNGKLKCP |
| 648 | MVTKVICFLVLASVLLAVAFPVSALRQQVKKGGGGEGGGGGSVSGSGGGNL |
| | NPWECSPKCGSRCSKTQYRKACLTLCNKCCAKCLCVPPGFYGNKGACPCYNN |
| | WKTREGGPKCP |
| 649 | MSKPSRCRAVQTQVALLLLLLVAASLLQAGDAASGFCAGKCAVRCGRSRAK |
| | RGACMKYCGLCCXECACVPTGRSGSRDECPCYRDMLTAGPRKRPKCP |
| 650 | MKPLPVTLALLALFLVASYQDLTVAADADADAAGAGDVGAVPVPDSVCEGK |
| | CKNRCSQKVAGRCMGLCMMCCGKCAGCVPSGPLAPKDECPCYRDMKSPKS |
| | GRPKCP |
| 651 | MKKLRTTTATTTLALILLLVLIAATSLRVAMAGSAFCDSKCGVRCSKAGRHD |
| | DCLKYCGICCAECNCVPSGTAGNKDECPCYRDKTTGHGARTRPKCP |
| 652 | MKKLRTTTLALLLLLVFLAASSLRAAMAGSAFCDGKCGVRCSKASRHDDCLK |
| | YCGICCAECNCVPSGTAGNKDECPCYRDKTTGHGARKRPKCP |
| 653 | MESKSPWSLRLLICCAAMVAIALLPQQGGQAACFVPTPGPAPAPPGSSATNTN |
| | ASSAAPRPAKPSAFPPPMYGGVTPGTGSLQPHECGGRCAERCSATAYQKPCLF |
| | FCRKCCAACLCVPPGTYGNKNTCPCYNNWKTKRGGPKCP |
| 654 | MAKASSRLLFSLSLVVLLLLVETTTSPHGQADAIDCGASCSYRCSKSGRPKMC |
| | LRACGTCCQRCGCVPPGTSGNEDVCPCYANMKTHDGQHKCP |
| 655 | MKAIPVALLLLVLVAAASSFKHLAEAADGGAVPDGVCDGKCRSRCSLKKAG |
| | RCMGLCMMCCGKCQGCVPSGPYASKDECPCYRDMKSPKNQRPKCP |
| 656 | MMTTMKKKKQQQQLLLLSLMFLVAVTAAAVAADPHPQQVQVQQQQQAQM |
| | RINRATRSLLPQPPPKLDCPSTCSVRCGNNWKNQMCNKMCNVCCNKCSCVPP |
| | GTGQDTRHLCPCYDTMLNPHTGKLKCP |
| 657 | MAVAKPPLQTAAVLLLLLLVVAAASWLQTVDAASGFCSSKCSVRCGRAASA |
| | RARGACMRSCGLCCEECNCVPTRPPRDVNECPCYRDMLTAGPRKRPKCP |
| 658 | MAPSKLAVVVALVASLLLLTTSNTKLGLFVLGQAAPGAYPPRAPPPHQIVDLA |
| | KDCGGACDVRCGAHSRKNICTRACLKCCGVCRCVPAGTAGNQQTCGKCYTD |
| | WTTHGNKTKCP |
| 659 | MKLQATARVAGLLFLVLLLALPSLRVSMAGSGFCDGKCAVRCSKASRHDDCL |
| | KYCGICCATCNCVPSGTAGNKDECPCYRDMTTGHGNRTRPKCP |
| 660 | MVTKVICFLVLASVLLAVAFPVSALRQQVKKGGGGEGGGGGSVSGSGGGNL |
| | NPWECSPKCGSRCSKTQYRKACLTLCNKCCAKCLCVPPGFYGNKGACPCYNN |
| | WKTKEGGPKCP |
| 661 | KWKGIGAVLKVLTTGX |
| 662 | KWKLFKKIGIGAVLKVLTTGLPALIX |
| 663 | RLCRVVIRVCR |
| 664 | CYCRIPACIAGERRYGTCIYQGRLWAFCC |
| 665 | MPRWRLFRRIDRVGKQIKQGILRAGPAIALVGDARAVG |
| 666 | KWKVFKKIEKMGRNIRNGIVKAGPAIAVLGEAKALG |
| 667 | KWKLFKKIEKVGQNIRDGIIKAGPAVAVVGQATQIAK |
| 668 | GIGKFLKKAKKFGKAFVKILKK |
| 669 | GIGKFLKKAKKFGKAFVKILKX |
| 670 | MNLAKGKEESLDSDLYAELRCMCIKTTSGIHPKNIQSLEVIGKGTHCNQVEVIA |
| | TLKDGRKICLDPDAPRIKKIVQKKLAGDESAD |
| 671 | MGHHHHHHHHHHSSGHIEGRHMYAELRCMCIKTTSGIHPKNIQSLEVIGKGTH |
| | CNQVEVIATLKDGRKICLDPDAPRIKKIVQKKLAGDESAI |
| 672 | MGHHHHHHHHHHSSGHIEGRHMYLRCMCIKTTSGIHPKNIQSLEVIGKGTHC |
| | NQVEVIATLKDGRKICLDPDAPRIKKIVQKKLAGDESAD |
| 673 | MNLAKGKEESLDSDLYAELRCMCIKTTSGIHPKNIQSLEVIGKGTHCNQVEVIA |
| | TLKDGRKICLDPDAPRIKKIVQKKLAGDES |
| 674 | MAELRCMCIKTTSGIHPKNIQSLEVIGKGTHCNQVEVIATLKDGRKICLDPDAP |
| | RIKKIVQKKLAGDES |
| 675 | AELRCMCIKTTSGIHPKNIQSLEVIGKGTHCNQVEVIATLKDGRKICLDPDAPRI |
| | KKIVQKKLAGDESAD |
| 676 | LRCMCIKTTSGIHPKNIQSLEVIGKGTHCNQVEVIATLKDGRKICLDPDAPRIKK |
| | IVQKKLAGDESAD |
| 677 | NLAKGKEESLDSDLYAELRCMCIKTTSGIHPKNIQSLEVIGKGTHCNQVEVIAT |
| | LKDGRKICLDPDAPRIKKIVQKKLAGDES |
| 678 | AGDES |
| 679 | YAELR |
| 680 | AELRCMCIKTTSGIHPKNIQSLEVIGKGTHCNQVEVIATLKDGRKICLDPDAPRI |
| | KKIVQKKLAGDES |
| 681 | AELR |
| 682 | NLAKGKEESLDSDLYAELRCMCIKTTSGIHPKNIQSLEVIGKGTHCNQVEVIAT |
| | LKDGRKICLDPDAPRIKKIVQKKLAGDESAD |
| 683 | RVIEVVQGACRAIRHIPRRIRQGLERIL |
| 684 | RVVRVVRRWVRRVRRVWRRVVRVVRRWVRRVRRVWRRVVRVVRRWVRR |
| 685 | WRWWKVVWRWVKW |
| 686 | WRWWKVWRWVKW |
| 687 | ILRWPWWPWRRK |
| 688 | RLARIVVIRVAR |
| 689 | GKPRPYSPIPTSPRPIRY |
| 690 | KWKLFIKKLTPAVKKVLLTGLPALIS |
| 691 | KWKSFIKKLTSAAKKVLTTGLPALIS |
| 692 | KWKLFKKIGIGAVLKVLTTGLPALKLTK |
| 693 | KKWWRRALQALKNGLPALIS |
| 694 | WRWWKVAWRWVKW |
| 695 | WRWWKPKWRWPKW |
| 696 | RRIWKPKWRLPKR |
| 697 | ILRWPWWPWRRA |
| 698 | ILRWPWWPWRAK |
| 699 | ILRWPWWPWARK |
| 700 | ILRWPWWPARRK |
| 701 | ILRWPWWAWRRK |
| 702 | ILRWPWAPWRRK |
| 703 | ILRWPAWPWRRK |
| 704 | ILRWAWWPWRRK |
| 705 | ILRAPWWPWRRK |
| 706 | ILAWPWWPWRRK |
| 707 | IARWPWWPWRRK |
| 708 | ALRWPWWPWRRK |
| 709 | RWWWPWRRK |
| 710 | WPWWPWRRK |
| 711 | LRWPWWPW |
| 712 | LRWWWPWRRK |
| 713 | LWPWWPWRRK |
| 714 | ILKKWPWWPWR |
| 715 | ILKKWPWWPWK |
| 716 | ILKKWPWWPWRR |
| 717 | ILKKWPWWPRRK |
| 718 | ILKKWPWWWRRK |
| 719 | ILKKWWWPWRRK |
| 720 | ILKKPWWPWRRK |
| 721 | IKKWPWWPWRRK |
| 722 | WVRLWWRRVW |
| 723 | RLWVWWVWRR |
| 724 | RLVVWVVWRR |
| 725 | RLFVWWVFRR |
| 726 | RLVVWWVVRR |
| 727 | RLWWVVWWRR |
| 728 | RLGGGWVWWVWRR |
| 729 | RLWVWWVWRRK |
| 730 | ILRWWVWWVWWRRK |
| 731 | ILRRWVWWVWRRK |
| 732 | KRRWVWWVWRLI |
| 733 | ILRWVWWVWRRK |
| 734 | ILKKWVWWPWRRK |
| 735 | ILKKWPWWVWRRK |
| 736 | ILKKWVWWVWRRK |
| 737 | ILKKWPWWPWRRK |
| 738 | CLRWPWWPWRRK |
| 739 | WRIWKPKWRLPKW |
| 740 | ILKKWPWWWRK |
| 741 | ILKKWWWPWRK |
| 742 | ILKKWPWWPWRRIM |
| 743 | ILKKWPWWPWRRKM |
| 744 | ILKKWPW |
| 745 | WWPWRRK |
| 746 | ILKKWPWWPWRRIMILKKAGS |
| 747 | ILKKWPWWPWRRMILKKAGS |
| 748 | ILKKWPWWPWRRKMILKKAGS |
| 749 | PWWPWRRK |
| 750 | LKKWPWWPWRRK |
| 751 | WWKKWPWWPWRRK |
| 752 | ILKKWPWWAWRRK |
| 753 | ILKKWAWWPWRRK |
| 754 | ILKWVWWVWRRK |
| 755 | KRKWPWWPWRLI |
| 756 | ILRWPWWPWRRKILMRWPWWPWRRKMAA |
| 757 | ILRWPWRRWPWRRK |
| 758 | ILRWPWWPWRRKDMILKKAGS |
| 759 | ILRWPWWPWRRKMILKKAGS |
| 760 | ILRWPWWPWRRKIMILKKAGS |
| 761 | ILKKWPWWPWKKK |
| 762 | ILRRWPWWPWRRR |
| 763 | ILWPWWPWRRK |
| 764 | KRRWPWWPWRLI |
| 765 | ILKWPWWPWRK |
| 766 | ILKKWPWWPWRK |
| 767 | ILKWPWWPWRRK |
| 768 | ILRRWPWWPWRK |
| 769 | ILRRWPWWPWRRK |
| 770 | WWRWPWWPWRRK |
| 771 | ILRWPWWPWWPWRRK |
| 772 | ILRYVYYVYRRK |
| 773 | ILKKFPFWPWRRK |
| 774 | ILKKFPWFPWRRK |
| 775 | ILKKYPWYPWRRK |
| 776 | ILKKWPWPWRRK |
| 777 | ILKKYPYYPYRRK |
| 778 | ILKKIPIIPIRRK |
| 779 | ILKKFPFLPFRRK |
| 780 | KRRWPWWPWKKLI |
| 781 | KKAAAKAAAAAKAAWAAKAAAKKKK |
| 782 | DPVTCLKSGAICHPVFCPRRYKQIGTCGLPGTKCCK |
| 783 | ALWKTMLKKLGTMALHAGKAALGAAADTISQTQ |
| 784 | SIGSAFKKAAHVGKHVGKAALGAAARRRK |
| 785 | ALWKTMLKKAAHVGKHVGKAALGAAARRRK |
| 786 | GWGSFFKKAAHVGKHVGKAALGAAARRRK |
| 787 | SIGSAFKKAAHVGKHVGKAALTHYL |
| 788 | ALWKTMLKKAAHVGKHVGKAALTHYL |
| 789 | KGWGSFFKKAAHVGKHVGKAALTHYL |
| 790 | KKWKKFIKKIGIGAVLTTPGAKK |
| 791 | KWKKFIKKIGIGAVLKVLTTGLPALKLTKK |
| 792 | KWKSFIKKLTSAAKKVTTAAKPLTK |
| 793 | KLWKLFKKIGIGAVLKVLKVLTTGLPALKLTLK |
| 794 | KWKFKKIGIGAVLKVLKVLTTGLPALKLTLK |
| 795 | KLFKKIGIGAVLKVLKVLTTGLPALKLTLK |
| 796 | KWKLFKKIGIGAVLKVLKVLTTGLPALKLTLK |
| 797 | KWKKFIKSLTKSAAKTVVKTAKKPLIV |
| 798 | KWKSFIKKLTKAAKKVVTTAKKPLIV |
| 799 | KWKSFIKKLTSAAKKVVTTAKPLALIS |
| 800 | HIFR |
| 801 | FFRHLFRGAKAIFRGARQGXRAHKVVSRYRNRDVPETDNNQEEP |
| 802 | FFHHIFRGIVHVGKTIHRLVTG |
| 803 | FIHHIFRGIVHAGRSIGRFLTG |
| 804 | RRWCFRVCYRGXFCYRKCR |
| 805 | RRWCXRVCYXGFCYRKCR |
| 806 | RXWCXXXCYRGFCXXXCR |
| 807 | RRWCFXVCXRGXCYXXCRX |
| 808 | XRWCFRVCYXGXCXXXCR |
| 809 | WCFXVCXRGXCRXKCRR |
| 810 | RRWCFRVCYRGRFCYRKCR |
| 811 | RRWCRRVCYAGFCYRKCR |
| 812 | RVWCRYRCYRGFCRRFCR |
| 813 | RVWCRRRCYRGFCRYFCR |
| 814 | RRWCFIVCRRGRCYVACRR |
| 815 | RRWCFIVCRRGACYRRCR |
| 816 | RRWCFRVCYRGFCRYFCR |
| 817 | RRWCFRVCYKGFCRYKCR |
| 818 | FRWCFRVCYKGRCRYKCR |
| 819 | WCFAVCYRGRCRRKCRR |
| 820 | WCFAVCRRGRCRYKCRR |
| 821 | ALYKKKIIKKLLES |
| 822 | YAERLCXCSIKAEV |
| 823 | ANLIATKKNGRKLCL |
| 824 | KFDKSKLKKTETQEKNPL |
| 825 | EGVNDNEEGFFSA |
| 826 | ADSGEGDFLAEGGGVRKLIK |
| 827 | ADSGEGDFLAEGGGVR |
| 828 | SWVQEYVYDLEL |
| 829 | EWVQKYVSDLELSAWKKILK |
| 830 | KWVREYINSLEMSKKGLAG |
| 831 | PRIKKIVQKKLAG |
| 832 | KWKWWWWWKWK |
| 833 | KGYFYFLFKFK |
| 834 | KFKHYFFWKYK |
| 835 | YAERLCTCSIKAEV |
| 836 | SAIHPSSILKLEVICIGVLQ |
| 837 | RFEKSKIK |
| 838 | ATKKNGRKLCLDLQAAL |
| 839 | ALYKRLFKKLKKF |
| 840 | GLYKRLFKKLLKS |
| 841 | ALYKKLFKKLLKR |
| 842 | KLYKKWKNKLKRSLKRLG |
| 843 | ALYKKWKNKLLKS |
| 844 | KLYKKWKKKLLKLK |
| 845 | ARYRKFRNKILRS |
| 846 | ARYRKFKNKILKS |
| 847 | KLYRKFKNKLLKLK |
| 848 | ARYKKFKKKLLKS |
| 849 | ALYKKFKKKLLKSLKRLG |
| 850 | SDDPKESEGDLHCVCVKTTSLVRPGHITNLELIKAGGHCPTANLIATKKNGRK |
| | LCLDLQAALYKKKIIKKLLES |
| 851 | SDDPKESEGDLHCVCVKTTSLVRPRHITNLELIKAGGHCPTANLIATKKNGRK |
| | LCLDLQAALYKKKIIKKLLES |
| 852 | RHFCGGALIHARYVMTAASS |
| 853 | RHYCGGALIHARFVMTAASS |
| 854 | RHFCGGALIHARFAMTAASS |
| 855 | RHFCGGALIHARFIMTAASS |
| 856 | RHFCGGALIHARFLMTAASS |
| 857 | RHFCAAALIHARFVMTAASS |
| 858 | RHFCGAALIHARFVMTAASS |
| 859 | RHFCAGALIHARFVMTAASS |
| 860 | RHFSGGALIHARYVMTAASC |
| 861 | RHYSGGALIHARFVMTAASC |
| 862 | RHFSGGALIHARFAMTAASC |
| 863 | RHFSGGALIHARFIMTAASC |
| 864 | RHFSGGALIHARFLMTAASC |
| 865 | RHFSAAALIHARFVMTAASC |
| 866 | RHFSGAALIHARFVMTAASC |
| 867 | RHFSAGALIHARFVMTAASC |
| 868 | NQGRHFCGGALIHARFVMTAASCYQ |
| 869 | NQGRHYCGGALIHARFVMTAASCFQ |
| 870 | NQGRHFCGGALIHARFAMTAASCFQ |
| 871 | NQGRHFCGGALIHARFIMTAASCFQ |
| 872 | NQGRHFCGGALIHARFLMTAASCFQ |
| 873 | NQGRHFCGGALIHARFVMTAATCFQ |
| 874 | NQGRHFCAAALIHARFVMTAASSFQ |
| 875 | NQGRHFCGAALIHARFVMTAASSFQ |
| 876 | NQGRHFCAGALIHARFVMTAASSFQ |
| 877 | NQGRHFSAAALIHARFVMTAASCFQ |
| 878 | NQGRHFSGAALIHARFVMTAASCFQ |
| 879 | NQGRHFSAGALIHARFVMTAASCFQ |
| 880 | NQGRHFCAAALIHARFVMTAASCFQ |
| 881 | NQGRHFCGAALIHARFVMTAASCFQ |
| 882 | NQGRHFCAGALIHARFVMTAASCFQ |
| 883 | RHFCGGALIHARFVMTAAKS |
| 884 | RHFCGGALIHARFVMTAARS |
| 885 | RHFCGGALIHARFVMTAAHS |
| 886 | RHFSGGALIHARFVMTAAKC |
| 887 | RHFSGGALIHARFVMTAARC |
| 888 | RHFSGGALIHARFVMTAAHC |
| 889 | NQGRHFCGGALIHARFVMTAAKSFQ |
| 890 | NQGRHFCGGALIHARFVMTAARSFQ |
| 891 | NQGRHFCGGALIHARFVMTAAHSFQ |
| 892 | NQGRHFSGGALIHARFVMTAAKCFQ |
| 893 | NQGRHFSGGALIHARFVMTAARCFQ |
| 894 | NQGRHFSGGALIHARFVMTAAHCFQ |
| 895 | RHFCGGALIHARFVMTAAKC |
| 896 | RHFCGGALIHARFVMTAARC |
| 897 | RHFCGGALIHARFVMTAAHC |
| 898 | NQGRHFCGGALIHARFVMTAAKCFQ |
| 899 | NQGRHFCGGALIHARFVMTAARCFQ |
| 900 | RHFSGGALIHARFVMTAASS |
| 901 | NQGRHFSGGALIHARFVMTAASSFQ |
| 902 | RHFCGGALIHARFVMTAASS |
| 903 | NQGRHFCGGALIHARFVMTAASSFQ |
| 904 | RHFSGGALIHARFVMTAASC |
| 905 | NQGRHFSGGALIHARFVMTAASCFQ |
| 906 | RHFCGGALIHARFVMTAASC |
| 907 | NQGRHFCGGALIHARFVMTAASCFQ |
| 908 | MRTSYLLLFTLCLLLSEMASGGNFLTGLGHRSDHYNCVSSGGQCLYSACPIFT |
| | KIQGTCYRGKAKCCK |
| 909 | YQVIQSWEHWRE |
| 910 | YKIIQQWFHWRRV |
| 911 | MKFACALLALLGLATSCSFIVFRSEWRALPSECSSRLGHPVRYVVISHTRGSFC |
| | NSFDSCEQQARNVQHYHKNELEWCDVAYNIKEDHTEPIYNPMSIGITFMGNF |
| | MDRVRKAALRAALNLLESGVSRGFLRSNYEVKGH |
| 912 | MSRRYTPLAWVLLALLGLGAAQDCGSIVSRGKWGALASKCSQRLRQPVRYV |
| | VVSHTAGSVCNTPASCQRQAQNVQYYHVRERGWCDVGYNFKIGEDGKVYE |
| | GRGWNTKGDHSGPTWNPIAIGISFMGNYMHRVFFASALRAAQSLLACGAARG |
| | YLTPNYEVKGHRDVQQTLSPGDELYKIIQQWPHYRRV |
| 913 | NHRSCYRNKGVCAPARCPRNMRQIGTCHGPPVKCCR |
| 914 | SRRSCHRNKGVCALTRCPRNMRQIGTCFGPPVKCCR |
| 915 | MRVLYLLFSFLFIFLMPLPGVFGGIGDPVTCLKSGAICHPVFCPRRYKQIGTCGL |
| | PGTKCCKKP |
| 916 | MRVLYLLFSFLFIFLMPLPGVFGGISDPVTCLKSGAICHPVFCPRRYKQIGTCGL |
| | PGTKCCKKP |
| 917 | MRLHHLLLALLFLVLSAGSGFTQGVRNSQSCRRNKGICVPIRCPGSMRQIGTCL |
| | GAQVKCCRRK |
| 918 | MRLVVCLVFLASFALVCQGQVYKGGYTRPIPRPPFVRPVPGGPIGPYNGCPVS |
| | CRGISFSQARSCCSRLGRCCHVGKGYSG |
| 919 | MRLVVCLVFLASFALVCQGQVYKGGYTRPVPRPPPFVRPLPGGPIGPYNGCPV |
| | SCRGISFSQARSCCSRLGRCCHVGKGYSG |
| 920 | EVYKGGYTRPIPRPPPFVRPLPGGPIGPYNGCPVSCRGISFSQARSCCSRLGRCC |
| | HVGKGYS |
| 921 | YRGGYTGPIPRPPPIGRPPLRLVVCACYRLSVSDARNCCIKFGSCCHLVK |
| 922 | MRLVVCLVFLASFALVCQGQVYKGGYTRPIPRPPPFVRPLPGGPIGPYNGCPVS |
| | CRGISFSQARSCCSRLGRCCHVGKG |
| 923 | MRLVVCLVFLASFALVCQGEAYRGGYTGPIPRPPPIGRPPFRPVCNACYRLSVS |
| | DARNCCIKFGSCCHLVKG |
| 924 | LLASDEEIQDVSGTWYLKA |
| 925 | SSSKEENRIIPGGI |
| 926 | GMASKGAIAGKIAKVALKAL |
| 927 | KRKFHEKHHSHRGY |
| 928 | DSHAKRHHGYKRKFHEKHHSHRGY |
| 929 | KRLFKKLKFSLRKY |
| 930 | KRLFKELKFSLRKY |
| 931 | YGRHSHHKEHFKRKC |
| 932 | KRKFHEKHHSHRGYC |
| 933 | KRLFKELLFSLRKY |
| 934 | KRLFKELKFSLRKY |
| 935 | LLLFLLKKRKKRKY |
| 936 | KRLFKKLLFSLRKY |
| 937 | KRLFKELLKSLRKY |
| 938 | KRLFKELKKSLRKY |
| 939 | IKISGKWKAQKRFLKMSGC |
| 940 | GKWKAFKKAAKKFAKKCS |
| 941 | GKWKLFKKAAKKFLKKCS |
| 942 | GKLKKKWKAAKKFLKKCS |
| 943 | CGGGGGGGGGKWKAFKKAFKKFAKILACG |
| 944 | GKWKLFKKAFKKFLKILAG |
| 945 | GKWKAFKKAFKKFAKILAG |
| 946 | GKWKLFKKAFKKFLKILAC |
| 947 | GRLRKKWKAFKKFLKILAC |
| 948 | IGKFLHSAKKFAKAFAFVAEIMNS |
| 949 | GIGKFLHSAKKFAKAFVAEIMNS |
| 950 | GIGKFLHAAKKFAKAFVAEIMNS |
| 951 | IGKFLHAAKKFAKAFVAEIMNS |
| 952 | GIGKFLHSAKKFGKAFVGEIMNSK |
| 953 | QKYYCRVRGGRCAVLSCLPKEEQIGKCSTRGRKCCR |
| 954 | NQGRHFCGGALIHARYVMTAASCFQ |
| 955 | RRLRRIIRKGIRIIKKYG |
| 956 | KRLRRIIRKGIHIIKKYG |
| 957 | KNLRRIIRKGIRIIKKYG |
| 958 | KNLRRIIRKGIHIIKKYG |
| 959 | KNLRRIIRKIAHIIKKYG |
| 960 | KNLRRIIRKIDHIIKKYG |
| 961 | KNLRRIIRKIEHIIKKYG |
| 962 | KNLRRIIRKISHIIKKYG |
| 963 | KNLRRIIRKITHIIKKYG |
| 964 | KNLRRIIRKIGHIIKKYG |
| 965 | KNLRRIIRKAIHIIKKYG |
| 966 | KNLRRIIRKDIHIIKKYG |
| 967 | KNLRRIIRKEIHIIKKYG |
| 968 | KNLRRIIRKSIHIIKKYG |
| 969 | KNLRRIIRKTIHIIKKYG |
| 970 | KNLRRIARKIIHIIKKYG |
| 971 | KNLRRIDRKIIHIIKKYG |
| 972 | KNLRRIERKIIHIIKKYG |
| 973 | KNLRRISRKIIHIIKKYG |
| 974 | KNLRRITRKIIHIIKKYG |
| 975 | KNLRRIGRKIIHIIKKYG |
| 976 | KNLRRAIRKIIHIIKKYG |
| 977 | KNLRRDIRKIIHIIKKYG |
| 978 | KNLRREIRKIIHIIKKYG |
| 979 | KNLRRSIRKIIHIIKKYG |
| 980 | KNLRRTIRKIIHIIKKYG |
| 981 | KNLRRGIRKIIHIIKKYG |
| 982 | MRLHHLLLALLFLVLSAWSGFTQGVGNPVSCVRNKGICVPIRCPGSMKQIGTC |
| | VGRAVKCCRKK |
| 983 | NSQSCRRNKGICVPIRCPGSMRQIGTCLGAQVKCCR |
| 984 | MKTHYFLLVMICFLFSQMEPGVGILTSLGRRTDQYKCLQHGGFCLRSSCPSNT |
| | KLQGTCKPDKPNCCKS |
| 985 | DHYNCVSSGGQCLYSACPIFTKIQGTCYRGKAKCCK |
| 986 | MLLLLVENHAEIVVSTVEASAPQPHKNTTHTLSHAPAPQPHKNTKSPVPNLQH |
| | GITEGSLKPQECGPRCTARCSNTQYKKPCLFFCQKCCAKCLCVPPGTYGNKQV |
| | CPCYNNWKTKRGGPKCP |
| 987 | MALRELLMMGILLLVCLAKVSSDVNMQKEEDEELRFPNHPLIVRDGNRRLMQ |
| | DIDCGGLCKTRCSAHSRPNVCNRACGTCCVRCKCVPPGTSGNRELCGTCYTD |
| | MITHGNKTKCP |
| 988 | MAISKSTVVVVILCFILIQELGIYGEDPHMDAAKKIDCGGKCNSRCSKARRQK |
| | MCIRACNSCCKKCRCVPPGTSGNRDLCPCYARLTTHGGKLKCP |
| 989 | MKLVFGTLLLCSLLLSFSFLEPVIAYEDSSYCSNKCADRCSSAGVKDRCVKYC |
| | GICCAECKCVPSGTYGNKHECPCYRDKLNKKGKPKCP |
| 990 | MKVAFAAVLLICLVLSSSLELVSMAGSAFCSSKCSKRCSRAGMKDRCMKFCGI |
| | CCSKCNCVPSGTYGNKHECPCYRDMKNSKGKAKCP |
| 991 | MKVAFVAVLLICLVLSSSLELVSMAGSAFCSSKCAKRCSRAGMKDRCTRFCGI |
| | CCSKCRCVPSGTYGNKHECPCYRDMKNSKGKPKCP |
| 992 | MAGGRGRGGGGGGGVAGGGNLRPWECSPKCAGRCSNTQYKKACLTFCNKC |
| | CAKCLCVPPGTYGNKGACPCYNNWKTKEGGPKCP |
| 993 | MESKSPWSLRLLICCAAMVAIALLPQQGGQAACFVPTPGPAPAPPGSSATNTN |
| | ASSAAPRPAKPSAFPPPMYGGVTPGTGSLQPHECGGRCAERCSATAYQKPCLF |
| | FCRKCCAACLCVPPGTYGNKNTCPCYNNWKTKRGGPKCP |
| 994 | MASRNKAAALLLCFLFLAAVAASAAEMIAGSGIGDGEGEELDKGGGGGGGH |
| | HKHEGYKNKDGKGNLKPSQCGGECRRRCSKTHHKKPCLFFCNKCCAKCLCV |
| | PPGTYGNKETCPCYNNWKTKKGGPKCP |
| 995 | PTHG |
| 996 | PVPMR |
| 997 | NGGVCIPIR |
| 998 | QIGTCFGRPVL |
| 999 | EGVRSYLSCWGNRGICLLNRCPGRMRQIGTCLAPRVKCCR |
| 1000 | EGVRNFVTCRINRGFCVPIRCPGHRRQIGTCLGPQIKCCR |
| 1001 | EGVRNFVTCRINRGFCVPIRCPGHRRQIGTCLGPRIKCCR |
| 1002 | EGVRNHVTCRIYGGFCVPIRCPGRTRQIGTCFGRPVKCCRRW |
| 1003 | EVVRNPQSCRWNMGVCIPISCPGNMRQIGTCFGPRVPCCR |
| 1004 | ERVRNPQSCRWNMGVCIPFLCRVGMRQIGTCFGPRVPCCRR |
| 1005 | EGVRNHVTCRINRGFCVPIRCPGRTRQIGTCFGPRIKCCRSW |
| 1006 | DFASCHTNGGICLPNRCPGHMIQIGICFRPRVLCCRSW |
| 1007 | ILKKWPWWPWPPFFRRK |
| 1008 | ILKKWPWWPWPPRRK |
| 1009 | ILKKWPWWPWRRWWK |
| 1010 | ILKKWPWWPWRWWRR |
| 1011 | ILKKWPWWPWWPWRRK |
| 1012 | FFKKFPFFPFKKK |
| 1013 | FFKKFPFFPFRRK |
| 1014 | FFKKWPWWPWRRK |
| 1015 | ILKKFPLLPFKKK |
| 1016 | ILKKWPWWRWRR |
| 1017 | ILPWKWPPWPPWPWRR |
| 1018 | ILPWKWFFPPWPWRR |
| 1019 | IKWPWYVWL |
| 1020 | ILPWKWPWYVRR |
| 1021 | ILKKWPWWPWKWKK |
| 1022 | ILKKWPWWPWKRR |
| 1023 | TLPCLWPWWPWSI |
| 1024 | IVPWKWTLWPWRR |
| 1025 | ILPWICPWRPSKAN |
| 1026 | ILPWKWPWWPWWKKPWRR |
| 1027 | ILPWKWPWWPWWPWRR |
| 1028 | ILPWKWPWRR |
| 1029 | PWKWPWWPWRR |
| 1030 | ILPWKWPWWPWKKWK |
| 1031 | ILPWKWPWWPWRRWR |
| 1032 | ILPWKWPWWPWRKWR |
| 1033 | ILPWKKWPWWRWRR |
| 1034 | ILKPWKWPWWPWRR |
| 1035 | ILKPWKWPWWPWRRKK |
| 1036 | NQGRHFCGGALIHARFVMTAAHCFQ |
| 1037 | MKTIILILLILGLGIDAKSLEESKADEEKFLRFIGSVIHGIGHLVHHIGVALGDDQ |
| | QDNGKFYGYYAEDNGKHWYDTGDQ |
| 1038 | MKTTILILLILGLGINAKSLEERKSEEEKLFKLLGKIIHHVGNFVHGFSHVFGDD |
| | QQDNGKFYGYYAEDNGKHWYDTGDQ |
| 1039 | MKTTILILLILGLGINAKSLEERKSEEEKAFKLLGRIIHHVGNFVYGFSHVFGDD |
| | QQDNGKFYGHYAEDNGKHWYDTGDQ |
| 1040 | MKTTILILLILGLGINAKSLEERKSEEEKVFHLLGKIIHHVGNFVYGFSHVFGDD |
| | QQDNGKFYGHYAEDNGKHWYDTGDQ |
| 1041 | MKTTILILLILGLGINAKSLEERKSEEEKVFQFLGKIIHHVGNFVHGFSHVFGDD |
| | QQDNGKFYGHYAEDNGKHWYDTGDQ |
| 1042 | RRRFPWWWPFLRRR |
| 1043 | RSGRGECRRQCLRRHEGQPWETQECMRRCRRRGG |
| 1044 | QIGTCFGRPVK |
| 1045 | FTQGVRNSQSCRRNKGICVPIRCPGSMRQIGTCLGAQVKCCRRK |
| 1046 | MGECVRGRCPSGMCCSQFGYCGKGPKYCG |
| 1047 | SRAAGLAARLARLAL |
| 1048 | MAARAAGLAARLAALALRAL |
| 1049 | MAARAAGLAARLAALALRA |
| 1050 | MAARAAGLAARLAALALR |
| 1051 | MASRAAGLARRLARLARRAL |
| 1052 | MASRAAGLARRLARLARRA |
| 1053 | MASRAAGLARRLARLARR |
| 1054 | MVSRAAGLAARLARLALRAL |
| 1055 | MVSRAAGLAARLARLALRA |
| 1056 | MVSRAAGLAARLARLALR |
| 1057 | ASRAAGLAARLARLALR |
| 1058 | MASRAAGLAARLARLALRAL |
| 1059 | MASRAAGLAARLARLALRA |
| 1060 | MASRAAGLAARLARLALR |
| 1061 | HPAFDRK |
| 1062 | HPAYDDK |
| 1063 | HPDYNAT |
| 1064 | HPDYNPD |
| 1065 | HPDYNPK |
| 1066 | YPCYDEY |
| 1067 | HPDYNQR |
| 1068 | HPAYNAK |
| 1069 | YPCYDPA |
| 1070 | HPQYNPR |
| 1071 | HPQYNPK |
| 1072 | GIGKFLHSAKKFKAFVGEIMN |
| 1073 | AAGTTCVTTGWGLTRYTNAN |
| 1074 | [sequence omitted] |
| 1075 | GNGVQCLAMGWGLLGRNRGI |
| 1076 | EAQTRCQVAGWGSQSRSGGR |
| 1077 | KPQDVCYVAGWGRMAPMGKY |
| 1078 | KPGQTCSVAGWGQTAPLGKS |
| 1079 | IIGGRESRPHSRPYMAYLQIQSPAGQSRCGGFLVREDFVLTAAHCWGSNINVTL |
| | GAHNIDRRENTQQHITARRAIRHPQYNQRTIQNDIMLLQLSRRVRRNRNVNPV |
| | ALPRAQEGLRPGTLCTVAGWGRVSMRRGTDTLREVQLRVQRDRQCLRIFGSY |
| | DPRRQICVGDRRERKAAFKGDSGGPLLCNNVAHGIVSYGKSSGVPPEVFTRVS |
| | SFLPWIRTTMR |
| 1080 | WGRVSMRRGT |
| 1081 | CTVAGWGRVSMRRGT |
| 1082 | RPGLTLCTVAGWG |
| 1083 | HPLYNQR |
| 1084 | HPEYNQR |
| 1085 | HPNYNQR |
| 1086 | HPQFNQR |
| 1087 | HPQKNTY |
| 1088 | HPQANQR |
| 1089 | HHQYNQR |
| 1090 | HPQYNPQ |
| 1091 | IIGGV |
| 1092 | IIGGH |
| 1093 | APQYNQR |
| 1094 | GKSSGVPPEVFTRFVSSFLPWIRTTMR |
| 1095 | FKGDSGGPLLCNNVAHGIVSY |
| 1096 | GSYDPRRQICVGDRRERKAA |
| 1097 | DTLREVQLRVQRDRQCLRIF |
| 1098 | RPGTLCTVAGWGRVSMRRGT |
| 1099 | RVRRNRNVNPVALPRAQEGL |
| 1100 | HPQYNQRTIQNDIMLLQLSR |
| 1101 | RRENTQQHITARRAIRHPQY |
| 1102 | TAAHCWGSNINVTLGAHNIQ |
| 1103 | QSPAGQSRCGGFLVREDFVL |
| 1104 | IIGGRESRPHSRPYMAYLQI |
| 1105 | RHPQYNQR |
| 1106 | HPQYNQ |
| 1107 | HAQYNQR |
| 1108 | HPQYNAR |
| 1109 | HPQYNQA |
| 1110 | HPQYAQR |
| 1111 | HPAYNQR |
| 1112 | HPAYNPR |
| 1113 | HPAYNPK |
| 1114 | HPQYNQR |
| 1115 | IVGGR |
| 1116 | IIGGR |
| 1117 | GELKKAWRKVKHAGRRVLDTAKGVGRHYVNNWLNRYR |
| 1118 | RVIEVVQGAYRAIRHIPRRIRQGLERIL |
| 1119 | YHELRDLLLIVTRIVELLGRE |
| 1120 | LLSEVYQILQPILQELSATLQRIREVLR |
| 1121 | FLIRQLIELLTWLFSNCRTLLSEVY |
| 1122 | RVIEVVQGACRAIRHIPRRSRQGLERIL |
| 1123 | RVIEVVQGACRASRHIPRRIRQGLERIL |
| 1124 | RVIEVVQGACRAIRHIPRRIEQGLERIL |
| 1125 | RVIEVVQGACRAIEHIPRRIRQGLERIL |
| 1126 | RVIEVVQGACRAIEHIPRRIEQGLERIL |
| 1127 | RVIRVVQGACRAIRHIPRRIRQGLRRIL |
| 1128 | KIAGYGLKGLAVIIKICIKGLNLIFEIIK |
| 1129 | RIIEFILNLGRICIRIIVALGRLGYGAIR |
| 1130 | RIAGYGLRGLAVIPRRICIRGLNLIFEIIR |
| 1131 | RIAGYGLRGLAVIIRIICRGLNLIFEIIR |
| 1132 | RIAGYGLRGLAVIIRCIIRGLNLIFEIIR |
| 1133 | RLLTWLRRTLLSRVYQILQEIL |
| 1134 | RLLTWLFSNRRTLLSRVYQILQEIL |
| 1135 | RLLTWLFSNCRTLLSRVYQILQPIL |
| 1136 | LLSKVYQILQPILQKLSATLQKIKEVLK |
| 1137 | RLVERIRQLTASLRQLIPQLIQYVRSLL |
| 1138 | LLSRVYQILQPILQRLCATLQRIREVLR |
| 1139 | LLSRVYQILQPILQRLSATLQAIREVL |
| 1140 | RLVRRIRQLTASRQLIPQLIQYV |
| 1141 | RLVERIRQLTASRQLIPQLIQYV |
| 1142 | FLIKQLIKLLTWLFSNCKTLLSKVY |
| 1143 | YVRSLLTRCNSFLWTLLRILQRILF |
| 1144 | FLIRQLIRLLTWLFPNCRTLLSRVY |
| 1145 | LLTRCNSFLWTLLRILQRILF |
| 1146 | FLIRQLIRLLTWLFSNCRTLL |
| 1147 | FLIRQLIRLLTWLFSNCRTLLSEVY |
| 1148 | FLIRQLIRQLLTWQPILQYILQ |
| 1149 | YHKLKLLLIVTKIVELLGKK |
| 1150 | RRGLLEVIRTVILLLRRLRHY |
| 1151 | RRGLLRVIRTVILLLDRLRHY |
| 1152 | RRGLLEVIRCVILLLDRLRHY |
| 1153 | RRGLLEVIRTVILLLRRL |
| 1154 | RRGLLRVIRTVILLLDRL |
| 1155 | RRGLLEVIRCVILLLDRL |
| 1156 | YHRLRDLLLIVTRIVELLGRR |
| 1157 | YHRLRDLLLIVCRIVELLGRR |
| 1158 | YHRLRDLLLIVCRIVELL |
| 1159 | RRGLLEVIRTVILALDRL |
| 1160 | RRGLLEVIRTVILALDRLRHY |
| 1161 | RRGLLEVIRTVILLLDRLRHY |
| 1162 | RRGLLRVIRTVILALDIL |
| 1163 | YHRLRDLALIVTRIVELL |
| 1164 | RRGLLEVIRTVILPRRLLDRL |
| 1165 | YHRLRDLLLIVTRIVELL |
| 1166 | YHRLLRDLLIVTRIVELL |
| 1167 | YHRLRDLLLIVRRIVCLL |
| 1168 | YHRLRDLLLIVTRIVCLL |
| 1169 | YHRLRDLLLIVTRIVRLL |
| 1170 | YHRLRDLLLIVRRIVELL |
| 1171 | YHRLRDLLRIVTRIVELL |
| 1172 | YHRLRRLLLIVTRIVELL |
| 1173 | YHRLLRDLLIVTRIVELLGRR |
| 1174 | YHRLRDLLLIVRRIVCLLGRR |
| 1175 | YHRLRDLLLIVTRIVCLLGRR |
| 1176 | YHRLRDLLLIVTRIVRLLGRR |
| 1177 | YHRLRDLLLIVRRIVELLGRR |
| 1178 | YHRLRDLLRIVTRIVELLGRR |
| 1179 | YHRLRRLLLIVTRIVELLGRR |
| 1180 | LWETLGRVGRWVLAIPRRIRQGLELAL |
| 1181 | DLWETLKKGGRWILAIPRRIKQGLELTL |
| 1182 | RIRRPIALIWRGGRRLTEWL |
| 1183 | WETLPRRIRGGRLWILAI |
| 1184 | WILAIPRRIRGGRLWETL |
| 1185 | LRRGGRWILAIPREIL |
| 1186 | LWETLRRGGRWILAIPREIL |
| 1187 | LRRGGRWILAIPRAIL |
| 1188 | LWETLRRGGRWILAIPRAIL |
| 1189 | LRRGGRWILAIPRRIR |
| 1190 | LWRLLRRGGRWILAIPRRIR |
| 1191 | LWELLRRGGRWILAIPRRIR |
| 1192 | LWETLRRIIRWILAIPRRIR |
| 1193 | LWETLRRGCRWILAIPRRIR |
| 1194 | LWETLRRGGRWILAIPRRIR |
| 1195 | DLWETLRRGCRWILAIPRRIR |
| 1196 | DLWETLRRGGRWILAIPRRIR |
| 1197 | DLWETLRRIIRWILAIPRRIR |
| 1198 | LWRLLRRGGRWILAIPRRIRQGLELTL |
| 1199 | LWELLRRGGRWILAIPRRIRQGLELTL |
| 1200 | LWETLRRGGRWILAIPRRIRRQIELTL |
| 1201 | LWETLRRGGRWILAIPRRIRRGLELTL |
| 1202 | LWETLRRGGRWILAIPRRIRQGLRLTL |
| 1203 | LWRTLRRGGRWILAIPRRIRQGLELTL |
| 1204 | LWETLRRGCRWILAIPRRIRQGLELTL |
| 1205 | LWETLRRGGRWILAIPRRIRQGLELCL |
| 1206 | LWETLRRGGRWILAIPRRIRQGLELTL |
| 1207 | DLWETLRRIIRWILAIPRRIRQGLELCL |
| 1208 | DLWETLRRGCRWILAIPRRIRQGLELTL |
| 1209 | DLWETLRRGGRWILAIPRRIRQGLELCL |
| 1210 | DLWETLRRIIRWILAIPRRIRQGLELTL |
| 1211 | KVIEVVQGACKAIKHIPKKIKQGLEKIL |
| 1212 | RAIRRAIRGAPRAILRAIL |
| 1213 | RAIRRAIRGAPRAIL |
| 1214 | LIRRLGQRIRRPIHRIARCAG |
| 1215 | LIRELGIRIRRPIHRIARCAG |
| 1216 | LIRELGQRIRRPIRRIARCAG |
| 1217 | LIRELGQRIRRPIHRIARCIG |
| 1218 | LIRELGQRIRRPIHRIARCAI |
| 1219 | LIRELGQRIRRPIHRIARCAR |
| 1220 | LIRELGQRIRRPIHRIARCAG |
| 1221 | LIRRLGQRIRRPIHRIARCAGQVV |
| 1222 | LIRELGIRIRRPIHRIARCAGQVV |
| 1223 | LIRELGQRIRRPIRRIARCAGQVV |
| 1224 | LIRELGQRIRRPIHRIARCIGQVV |
| 1225 | LIRELGQRIRRPIHRIARCAGRVV |
| 1226 | LIRELRQRIRRPIHRIARCARQVV |
| 1227 | LIRELGQRIRRPIHRIARCAGQVV |
| 1228 | RIRRPIRRIIRCIGQVVEIVR |
| 1229 | RIRRPIHRIIRCIGQVVRIVR |
| 1230 | RIRRPIRRIARCAGQVVEIVR |
| 1231 | RIRRPIHRIARCIGQVVEIVR |
| 1232 | RIRRPIHRIARCAGRVVEIVR |
| 1233 | RIRRPIHRIARCAGQVVRIVR |
| 1234 | RIRRPIHRIARCAGQVVEIVR |
| 1235 | LIRRLGQRIRRPIHRIARCAGQVVEIVR |
| 1236 | LIRELGIRIRRPIHRIARCAGQVVEIVR |
| 1237 | LIRELGQRIRRPIRRIARCAGQVVEIVR |
| 1238 | LIRELGQRIRRPIHRIARCIGQVVEIVR |
| 1239 | LIRELGQRIRRPIHRIARCAGRVVEIVR |
| 1240 | LIRELGQRIRRPIHRIARCAGQVVRIVR |
| 1241 | LIRELGQRIRRPIHRIARCAGQVVEIVR |
| 1242 | RRIRHIPRAIRVVQGAC |
| 1243 | RVIRVVRGACRAIRHIPRRIR |
| 1244 | RACRAIRHIPRRIR |
| 1245 | VVQRACRAIRHIPRRIR |
| 1246 | GACRAIRRIPRRIRGLERIL |
| 1247 | GACRAIRRIPRRIR |
| 1248 | VVQGACRAIRRIPRRIRGLERIL |
| 1249 | VVQGICRAIRHIPRRIRGLERIL |
| 1250 | VVRGACRAIRHIPRRIRGLERIL |
| 1251 | VVQRACRAIRRIPRRIR |
| 1252 | VVQGICRAIRHIPRRIR |
| 1253 | VVRGACRAIRHIPRRIR |
| 1254 | RVIEVVQGACRAIRRIPRRIRQGLERIL |
| 1255 | RVIEVVQGICRAIRHIPRRIRQGLERIL |
| 1256 | RVIEVVRGACRAIRHIPRRIRQGLERIL |
| 1257 | RVIRVVQGACRAIRHIPRRIRQGLERIL |
| 1258 | RVIEVVQGACRAIRRIPRRIR |
| 1259 | RVIEVVQGICRAIRHIPRRIR |
| 1260 | RVIEVVRGACRAIRHIPRRIR |
| 1261 | RVIRVVQGACRAIRHIPRRIR |
| 1262 | RVIEVVQGACRAIRHIPRRIRQGLRRIL |
| 1263 | RVIEVVQGACRAIRHIPRRIRQILERIL |
| 1264 | RVISVVQGACRAIRRIPRRIRQGLERIL |
| 1265 | RVISVVQGACRAIRRIPRRIR |
| 1266 | GACRAIRHIPRRIR |
| 1267 | VVQGACRAIRHIPRRIR |
| 1268 | RVIEVVQGACRAIRHIPRRIR |
| 1269 | RIAGYGLRGLAVIIRICIRGLNLIFEIIR |
| 1270 | LLSRVYQILQPILQRLSATLQRIREVLR |
| 1271 | FLIRQLIRLLTWLFSNCRTLLSRVY |
| 1272 | DLWETLRRGGRWILAIPRRIRQGLELTL |
| 1273 | RRIYRAIRHIPRRIR |
| 1274 | GAYRAIRHIPRRIR |
| 1275 | KLKKALRWLARHAK |
| 1276 | KWKKALRALARHLK |
| 1277 | IRALQRAVRHPRAIRRIYRGWKKAIR |
| 1278 | IQRVAQKLKKALRALARHWKRAL |
| 1279 | KLKKALRALARHWK |
| 1280 | AIANFFERLMKKLIWALMGEAVQT |
| 1281 | AIAIFKRIAKINFKALMGEAVQT |
| 1282 | AIAKFAKKALKSMLALMGEAVQT |
| 1283 | KLKKALRALARHWKGWLRRIGRRIERVGQH |
| 1284 | GWLRRIGRRIERVGQHKLKKALRALARHWK |
| 1285 | KKIEKAIKHIPKKIKLKKALRALARHWK |
| 1286 | RRIYRAIRHIPRRIRGWLRRIGRRIERVGQH |
| 1287 | QRAVGWLRRIGRRIERVGQHLRALAGPGVTIGIAHAKSQLW |
| 1288 | KLIRKLIRWLRRKIRALQRAVAGPGVTIGIAHAKSQLW |
| 1289 | IRALQRAVRHPRAIRRIYRGWKKAIRAGPGVTIGIAHAKSQLW |
| 1290 | IQRVAQKLKKALRALARHWKRALAGPGVTIGIAHAKSQLW |
| 1291 | QRAVKKIEKAIKHIPKKIKIRALAGPGVTIGIAHAKSQLW |
| 1292 | QRAVRRIYRAIRHIPRRIRIRALAGPGVTIGIAHAKSQLW |
| 1293 | KLKKALRALARHWKAGPGVTIGIAHAKSQLW |
| 1294 | KKIEKAIKHIPKKIKAGPGVTIGIAHAKSQLW |
| 1295 | GGGGSGGGGSGGGGS |
| 1296 | MGKNGSLCCFSLLLLLLLAGLASGHQVL |
| 1297 | MGRIARGSKMSSLIVSLLVVLVSLNLASETTA |
| 1298 | GIGKFLREAGKFGKAFVGEIMKP |
| 1299 | IGEDVYTPGISGDSLR |
| 1300 | AKSRWY |
| 1301 | RQIIVFMRKKNFVTKILKKQR |
| 1302 | RNSLPKVAYATA |
| 1303 | LAKLAVKAIKGAIAGAKSAMG |
| 1304 | KAIQTAQGVVAVAPGAKIIGDRINQGVKEIKKFLKWK |
| 1305 | RPGGQIAIAIGESIRKKASNELKKATKSLWS |
| 1306 | SNMIEGVFAKGFKKASHLFKGIG |
| 1307 | SKMIEGVFAKGFKGASHLFKGIG |
| 1308 | IIGGRESRPHSRPYMAYLQIQSPAGQSRCGGFLVREDFVLTAAHCWGSNINVTL |
| | GAHNIDRRENTQQHITARRAIRHPQYNQRTIQNDIMLLQLSRRVRRNRNVNPV |
| | ALPRAQEGLRPGTLCTVAGWGRVSMRRGTDTLR |
| 1309 | GIGGALLSAGKSALKGLAKGLAEHFAN |
| 1310 | AAPCFCSGKPGRGDLWILRGTCPGGYGYTSNCYKWPNICCYPH |
| 1311 | GIGAAILSAGKSIIKGLANGLAEHF |
| 1312 | ATCDALSFSSKWLTVNHSACAIHCLTKGYKGGRCVNTICNCRN |
| 1313 | VDKPDYRPRPRPPNM |
| 1314 | DDMTMKPTPPPQYPLNLQGGGGGQSGDGFGFAVQGHQKVWTSDNGRHEIGL |
| | NGGYGQHLGGPYGNSEPSWKVGSTYTYRFPNF |
| 1315 | AVDLAKIANIANKVLSSLFGK |
| 1316 | TAGPAIRASVKQCQKTLKATRLFTVSCKGKNGCK |
| 1317 | WKSESLCTPGCVTGALQTCFLQTLTCNCKISK |
| 1318 | KRGSGWIATITDDCPNSVFVCC |
| 1319 | GDVPPGIRNTICLMQQGTCRLFFCHSGEKKRDICSDPWNRCCVSNRDEEGKEK |
| | PKTDGRSGI |
| 1320 | GIGASILSAGKSALKGFAKGLAEHFAN |
| 1321 | GLLCYCRKGHCKRGERVRGTCGIRFLYCCPRR |
| 1322 | KNYGNGVHCTKKGCSVDWGYAWTNIANNSVMNGLTGGNAGWHN |
| 1323 | GKVWDWIKSTAKKLWNSEPVKELKNTALNAAKNFVAEKIGATPS |
| 1324 | GLLSGILNTAGGLLGNLIGSLSNGES |
| 1325 | GLLSGILNSAGGLLGNLIGSLSNGES |
| 1326 | SVLSTITDMAKAAGRAALNAITGLVNQGEQ |
| 1327 | GLMSVLGHAVGNVLGGLFKPKS |
| 1328 | GGLKKLGKKLEGAGKRVFNAAEKALPVVAGAKALG |
| 1329 | GGLKKLGKKLEGVGKRVFKASEKALPVAVGIKALG |
| 1330 | RRFPWWWPFLRRPRLRRQAFPPPNVPGPRFPPPNVPGPRFPPPNFPGPRFPPPNF |
| | PGPRFPPPNFPPPFPPPIFPGPWFPPPPPFRPPPFGPPRFPGRR |
| 1331 | AGWLRKLGKKIERIGQHTRDASIQVLGIAQQAANVAATAR |
| 1332 | GKNGVFKTISHECHLNTWAFLATCCS |
| 1333 | PLSCRRKGGICILIRCPGPMRQIGTCFGRPVKCCR |
| 1334 | GLLDALSGILGL |
| 1335 | GLLGTLGNLLNGLGL |
| 1336 | GIIDIAKKLVGGIRNVLGI |
| 1337 | GSNKGFNFMVDMIQALSN |
| 1338 | GSNKGFNFMVDMINALSN |
| 1339 | GSNKGFNFMVDMIQALSK |
| 1340 | GLFTFIKCAYKLRAPAVAC |
| 1341 | GFFTLIKAANKLINKTVNKEAGKGGLEIMA |
| 1342 | GVLGTVKNLLIGAGKSAAQSVLKTLSCKLFNDC |
| 1343 | VDKPDYRPRPWPRPN |
| 1344 | INNWVRVPPCDQVCSRTNPEKDECCRAHGHAFHATCSGGMQCYRR |
| 1345 | GLLSVLGSVAKHVLPHVVPVIAEHL |
| 1346 | ALGGLLADVVKSKEQPA |
| 1347 | ILGTILGLLKGL |
| 1348 | INWKALLDAAKKVL |
| 1349 | GLLSSLSSVAKHVLPHVVPVIAEHL |
| 1350 | GLWQKIKDKASELVSGIVEGVK |
| 1351 | GLLSSLSSVAKHVLPHVVPVIAEHL |
| 1352 | GLWQKIKNAAGDLASGIVEGIKS |
| 1353 | GLWQKIKSAAGDLASGIVEAIKS |
| 1354 | GLWQKIKSAAGDLASGIVEGIKS |
| 1355 | GLWEKIREKANELVSGIVEGVK |
| 1356 | GLVASIGRALGGLLADVVKSKEQPA |
| 1357 | GLVSSIGKALGGLLADVVKTKEQPA |
| 1358 | GLLSVLGSVVKHVIPHVVPVIAEHL |
| 1359 | GLLSVLGSVAQHVLPHVVPVIAEHL |
| 1360 | GLLGVLGSVAKHVLPHVVPVIAEHL |
| 1361 | GLWSKIKDVAAAAGKAALGAVNEALGEQ |
| 1362 | GLWSTIKQKGKEAAIAAAKAAGQAALGAL |
| 1363 | XXKEIXWIFHDN |
| 1364 | VDKPDYRPRPWPRPNM |
| 1365 | VDKPDYRPRPWPRNMI |
| 1366 | MSGGDGRGHNTGAHSTSGNINGGPTGLGVGGGASDGSGWSSENNPWGGGSG |
| | SGIHWGGGSGHGNGGGNGNSGGGSGTGGNLSAVAAPVAFGFPALSTPGAGG |
| | LAVSISAGALSAAIADIMAALKGPFKFGLWGVALYGVLPSQIAKDDPNMMSKI |
| | VTSLPADDITESPVSSLPLDKATVNVNVRVVDDVKDERQNISVVSGVPMSVPV |
| | VDAKPTERPGVFTASIPGAPVLNISVNNSTPEVQTLSPGVTNNTDKDVRPAGFT |
| | QGGNTRDAVIRFPKDSGHNAVYVSVSDVLSPDQVKQRQDEENRRQQEWDAT |
| | HPVEAAERNYERARAELNQANEDVARNQERQAKAVQVYNSRKSELDAANKT |
| | LADAIAEIKQFNRFAHDPMAGGHRMWQMAGLKAQRAQTDVNNKQAAFDAA |
| | AKEKSDADAALSAAQERRKQKENKEKDAKDKLDKESKRNKPGKATGKGKP |
| | VGDKWLDDAGKDSGAPIPDRIADKLRDKEFKNFDDFRKKFWEEVSKDPDLSK |
| | QFKGSNKTNIQKGKAPFARKKDQVGGRERFELHHDKPISQDGGVYDMNNIRV |
| | TTPKRHIDIHRGK |
| 1367 | DVLKKIGTVALHAGKAALGAVADTISQ |
| 1368 | PDPAKTAPKKKSKKAVT |
| 1369 | PDPAKTAPKKGSKKAVTKXA |
| 1370 | YSSGYTRPLPKPSRPIFIRPIGCDVCYGIPSSTARLCCFRYGDCCHR |
| 1371 | QGCKGPYTRPILRPYVRPVVSYNACTLSCRGITTTQARSCCTRLGRCCHVAKG |
| | YS |
| 1372 | QGYKGPYTRPILRPYVRPVVSYNACTLSCRGITTTQARSCSTRLGRCCHVAKG |
| | YS |
| 1373 | RWKIFKKIEKVGQNIRDGIVKAGPAVAVVGQAATI |
| 1374 | GWLKKLGKRIERIGQHTRDATIQGLGIAQQAANVAATARG |
| 1375 | GWLKKLGKRIERIGQHTRDATIQGLGIAQQAANVAATAR |
| 1376 | GWLKKIGKKIERVGQHTRDATIQTIGVAQQAANVAATLK |
| 1377 | VFIDILDKMENAIHKAAQAGIGIAKPIEKMILPK |
| 1378 | RWKIFKKIERVGQNVRDGIIKAGPAIQVLGTAKAL |
| 1379 | RWKFFKKIERVGQNVRDGLIKAGPAIQVLGAAKAL |
| 1380 | RWKVFKKIEKVGRNIRDGVIKAGPAIAVVGQAKAL |
| 1381 | RWKVFKKIEKVGRHIRDGVIKAGPAITVVGQATAL |
| 1382 | PWNIFKEIERAVARTRDAVISAGPAVRTVAAATSVAS |
| 1383 | QRFIHPTYRPPPQPRRPVIMRA |
| 1384 | GKIPIGAIKKAGKAIGKGLRAVNIASTAHDVYTFFKPKKRH |
| 1385 | SGFVLKGYTKTSQ |
| 1386 | AGFVLKGYTKTSQ |
| 1387 | GFLSTVKNLATNVAGTVIDTIKCKVTGGC |
| 1388 | GGLKKLGKKLEGVGKRVFKASEKALPVLTGYKAIG |
| 1389 | GGLKKLGKKLEGVGKRVFKASEKALPVLTGYKAIG |
| 1390 | MVTLVLLVFLLLNVVEDEAASFPFSCPTLSGVCRKLCLPTEMFFGPLGCGKGF |
| | LCCVSHF |
| 1391 | KWCFRVCYRGICYRRCR |
| 1392 | GWLKKIGKKIERVGQNTRDATVKGLEVAQQAANVAATVR |
| 1393 | GWLKKLGKRIERIGQHTRDATIQGLGIAQQAANVAATAR |
| 1394 | GWLKKLGKRIERIGQHTRDATIQGLGIAQQAANVAATAR |
| 1395 | GWLKKLGKRIERIGQHTRDATIQGLGIAQQAANVAATAR |
| 1396 | GWLKKLGKRIERIGQHTRDATIQGLGIAQQAANVAATAR |
| 1397 | AGWLRKLGKKIERIGQHTRDASIQVLGIAQQAANVAATAR |
| 1398 | GWLKKIGKKIERVGQHTRDATIQGLGVAQQAANVAATAR |
| 1399 | GNFFKDLEKMGQRVRDAVISAAPAVDTLAKAKALGQ |
| 1400 | VFVALILAIAIGQSEAGWLKKIGKKIERVGQHTRDATIQGLGIAQQAANVAAT |
| | AR |
| 1401 | QSEAGWLKKIGKKIERVGQHTRDATIQGLGVAQQAPNVAATAR |
| 1402 | GWLKKIGKKIERVGQHTRDATIQGLGIAQQAANVAATAR |
| 1403 | GWLKKIGKKIERIGQHTRDATIQGVGIAQQAANVAATAR |
| 1404 | GWLKKIGKKIERIGQHTRDATIQGLGIAQQAANVAATAR |
| 1405 | MRTLAILAAILLFALLAQAKSLQETADDAATQEQPGEDDQDLAVSFEENGLS |
| 1406 | CPPCPSCPSCPWCPMCPRCPS |
| 1407 | VRNSQSCRRNKGICVPIRCPGSMRQIGTCLGAQVKCCRRK |
| 1408 | IIGPVLGLVGKPLESLLE |
| 1409 | DPVTCLKNGAICHPVFCPRRYKQIGTCGLPGTKCCK |
| 1410 | DTLACRQSHGSCSFVACRAPSVDIGTCRGGKLKCCK |
| 1411 | MKWTAAFLVLVIVVLMAQPGECFLGLIFHGLVHAGKLIHGLI |
| 1412 | SRRSCHRNKGVCALTRCPRNMRQIGTCFGPPVKCCR |
| 1413 | NPVSCARNKGICVPSRCPGNMRQIGTCLGPPVKCCR |
| 1414 | SNMIEGVFAKGFKKASHLFKGIG |
| 1415 | MKAVFVLLVVGLCIMMMDVATAGFGCPNNYACHQHCKSIRGYCGGYCASW |
| | FRLRCTCYRCGGRRDDVEDIFDIYDNVAVERF |
| 1416 | GDVPLGIRNTICRMQQGICRLFFCHSGEKKRDICSDPWNRCCVSNTDEEGKEK |
| | PEMDGRSGI |
| 1417 | DLLPPRTPPYQEPASDLKVVDFRRSEGFCQEYCNYMETQVGYCPKKKDACCL |
| | H |
| 1418 | VHISHQEARGPSFKICVGFLGPRWARGCSTGN |
| 1419 | DLLPPRTPPYQVHISHQEARGPSFKICVGFLGPRWARGCSTGN |
| 1420 | GIGGALLSAGKAALKGLAKGFAEHF |
| 1421 | QVYKGGYTRPVPRPPPFVRPLPGGPIGPYNGCPVSCRGISFSQARSCCSRLGRC |
| | CHVGKGYS |
| 1422 | QVYKGGYTRPIPRPPFVRPVPGGPIGPYNGCPVSCRGISFSQARS CCSRLGRCC |
| | HVGKGYS |
| 1423 | GFLDKLKKGASDFANALVNSIKGT |
| 1424 | GLWEKIKEKANELVSGIVEGVK |
| 1425 | GLWEKIKEKASELVSGIVEGVK |
| 1426 | FFHHIFRGIVHVGKSIHKLVTG |
| 1427 | MSGGDGRGHNTGAHSTSGNINGGPTGLGVGGGASDGSGWSSENNPWGGGSG |
| | SGIHWGGGSGHGNGGGNGNSGGGSGTGGNLSAVAAPVAFGFPALSTPGAGG |
| | LAVSISAGALSAAIADIMAALKGPFKFGLWGVALYGVLPSQIAKDDPNMMSKI |
| | VTSLPADDITESPVSSLPLDKATVNVNVRVVDDVKDERQNISVVSGVPMSVPV |
| | VDAKPTERPGVFTASIPGAPVLNISVNNSTPAVQTLSPGVTNNTDKDVRPAGFT |
| | QGGNTRDAVIRFPKDSGHNAVYVSVSDVLSPDQVKQRQDEENRRQQEWDAT |
| | HPVEAAERNYERARAELNQANEDVARNQERQAKAVQVYNSRKSELDAANKT |
| | LADAIAEIKQFNRFAHDPMAGGHRMWQMAGLKAQRAQTDVNNKQAAFDAA |
| | AKEKSDADAALSSAMESRKKKEDKKRSAENNLNDEKNKPRKGFKDYGHDYH |
| | PAPKTENIKGLGDLKPGIPKTPKQNGGGKRKRWTGDKGRKIYEWDSQHGELE |
| | GYRASDGQHLGSFDPKTGNQLKGPDPKRNIKKYL |
| 1428 | VNHALCAAHCIARRYRGGYCNSKAVCVCR |
| 1429 | ATCDLASGFGVGSSLCAAHCIARRYRGGYCNSKAVCVCRN |
| 1430 | WNHTLCAAHCIARRYRGGYCNSKAVCVCR |
| 1431 | SQWVTPNDSLCAAHCIARRYRGGYCNGKRVCVCR |
| 1432 | SQWVTPNDSLCAAHCLVKGYRGGYCKNKICHCR |
| 1433 | GNGVLKTISHECNMNTWQFLFTCC |
| 1434 | FLPVIAGLAAKVLPKLFCAITKKC |
| 1435 | GKVWDWIKSTAKKLWNSEPVKELKNTALNAAKNLVAEKIGATPSE |
| 1436 | GKVWDWIKKTAKDVLNSDVAKQLKNKALNAAKNFVAEKIGATPS |
| 1437 | GILDTLKNLAKTAGKGILKSLVNTASCKLSGQC |
| 1438 | GLFGLAKGSVAKPHVVPVISQLV |
| 1439 | SVLGKSVAKHLPHVVPVIAEKT |
| 1440 | GLLSVLGSLKLIVPHVVPLIAEHL |
| 1441 | GLFGILGSVAKHVLPHVVPVIAEHS |
| 1442 | DSIQCFQKNNTCHTNQCPYFQDEIGTCYDRRGKCCQ |
| 1443 | ADTLACRQSHGSCSFVACRAPSVDIGTCRGGLKKCCKW |
| 1444 | NNEAQCEQAGGICSKDHCFHLHTRAFGHCQRGVPCRT |
| 1445 | GIGGALLSAGKSALKGLAKGLAEHFAN |
| 1446 | ILGPVLSLVGNALGGLLKNE |
| 1447 | ALRSAVRTVARVGRAVLPHVAIADPYVRTPYVHNNPDWSLWRRKRWNQQPT |
| | SQADMLEDALEAQAIEALMQEQ |
| 1448 | ALRGALRAVARVGKAILPHVAIANPYVRTPYVHNNPDWSLWRSRRRSGNQQP |
| | TSQAEILEDALEAQAIEALMQEQ |
| 1449 | LKCVNLQANGIKMTQECAKEDTKCLTLRSLKKTLKFCASGRTCTTMKIMSLP |
| | GEQITCCEGNMCNA |
| 1450 | LLGPVLGLVSNALGGLLKNI |
| 1451 | GLLSVFKGVLKGVGKNVAGSLLDQLKCKISGGC |
| 1452 | RLPPGFTPWRIAPAIV |
| 1453 | FLPMLAKLLSGFLGK |
| 1454 | GLFSVVKGVLKGVGKNVAGSLLDQLKCKISGGC |
| 1455 | ILGPVLGLVGSALGGLIKKI |
| 1456 | ILGPVLSLVGNALGGLIKKI |
| 1457 | KIKWFKTMKSLAKFLAKEQMKKHLGE |
| 1458 | CYREGGECLQRCIGLFHKIKCCK |
| 1459 | FLPKTLRKFFCRIRGGRCAVLNCLGKEEQIGRCSNSGRKCCRKKK |
| 1460 | DTIACIENKDTCRLKNCPRLHNVVGTCYEGKGKCCH |
| 1461 | DLKHLILKAQLTRCYKFGGFCHYNICPGNSRFMSNCHPENLRCCKNIKQF |
| 1462 | DCYCRIPACIAGERRYGTCIYQGRLWAFCC |
| 1463 | NPVTCLRSGAICHPGFCPRRYKHIGVCGVSAIKCCK |
| 1464 | NPVTCIRSGAICHPGFCPGRYKHIGVCGVPLIKCCK |
| 1465 | NPVTCLRSGAICHPGFCPRRYKHIGICGVSAIKCCK |
| 1466 | DTLACRQSHGSCSFVACRAPSVDIGTCRGGKLKCCK |
| 1467 | TQCRIRGGFCRVGSCRFPHIAIGKCATFISCC |
| 1468 | DEEKRENEDEENQEDDEQSEMRRGLRSKIKEAAKTAGKMALGFVNDMAGEQ |
| 1469 | EEEKRENEDEENQEDDEQSEMRRGLWSKIKEAAKTAGKMAMGFVNDMVGE |
| | Q |
| 1470 | EEEKRENEDEEEQEDDEQSEEKRALWKTLLKGAGKVFGHVAKQFLGSQGQPE |
| | S |
| 1471 | EEEKREGENEKEQEDDNQSEEKRGLVSDLLSTVTGLLGNLGGGGLKKI |
| 1472 | DEEKRENEDEENQEDDEQSEMRRGLRSKIWLWVLLMIWQESNKFKKM |
| 1473 | RDVICLMQHGTCRLFFCHSGEKKSEICSDPWNRCC |
| 1474 | LQDAALGWGRRCPRCPPCPNCRRCPRCPTCPSCNCNPK |
| 1475 | LQDAALGWGRRCPRCPPCPNCRRCPRCPTCPRCNCNPK |
| 1476 | LQDAALGWSRRCPRCPPCPNCRRCPRCPTCPSCNCNPK |
| 1477 | DCRFCCGCCTDVSGCGVCCRF |
| 1478 | FFFFDEKCSRINGRCTASCLKNEELVALCWKNLKCCVTVQSCGRSKGNQSDE |
| | GSGHMGTRG |
| 1479 | DLKHLILKAQLARCYKFGGFCYNSMCPPHTKFIGNCHPDHLHCCINMKELEGS |
| | T |
| 1480 | MRLVVCLVFLASFALVCQGQVYKGGYTRPVPRPPFVRPLPGGPIGPYNGCPVS |
| | CRGISFSQARSCCSRLGRCCHVGKG |
| 1481 | SLDKRACNFQSCWATCQAQHSIYFRRAFCDRSQCKCVFVRG |
| 1482 | VDCRRSEGFCQEYCNYMETQVGYCSKKKDACC |
| 1483 | AVGSLKSIGYEAELDHCHTNGGYCVRAICPPSARRPGSCFPEKNPCCKYMK |
| 1484 | PRITIDRVVLARESWRFTVTGLGFATLTGQGDRFRRVQRWQHAHGLPRHLFG |
| | WTPMEERPFSLDLTSPASVDVLAGALRRT |
| 1485 | KVTEQLKRCWGEYIRGYCRKICRISEIREVLCENGRYCCLNIVELEARRKITKPP |
| | PPE |
| 1486 | LALGHMQPGRSEFKRCWKGQGACRTYCTRQETYLHMCPDASLCCLPYGSRP |
| | L |
| 1487 | LSGRVLFPLSCIGSSGFCFPFRCPHNREEIGRCFFPIQ |
| 1488 | QKYYCRVRGGRCAVLSCLPKEEQIGKCSTRGRKCCR |
| 1489 | NSVTCSKNGGFCISPKCPPGMKQIGTCGLPGSKCCR |
| 1490 | MNNLHRELAPISEAAWAQIEEEASRTLKRYLAARRVVDVPEAKGFGFSAVGT |
| | GHVERIDAPGSDIRAVRRNVLPLVELRVPFTLARDAIDDVERGAGDSDWQPLK |
| | DAAKKIAFAEDRAVFDGYAAAGILGLREGTSNPKLALPSSASDYPAAIAAALN |
| | QLRLAGVNGPYAVVLGAGVYTALSGGDDEGYPVFRHIESLIDGKIVWAPAIEG |
| | GFVLSTRGGDFELDIGQDFSIGYSSHSADSVELYLQESFTFQLLTTEA |
| 1491 | MNNLHRELAPITSEAWAAIEEEAGRTFKRHIAGRRVVDVAGPHGVDFSAVGL |
| | GRTTGIAAPDEGVQARQRVVAPLVELRVPFTLSREELDNVERGAKDTDLDAV |
| | KEAARRIAFAEDRAIFEGYPAAGITGIRAAGSNAPITVPDDARLVPEAITQALTA |
| | LRLAGVDGPYSVLLSAELYTEVSETSDHGYPIRTHIERLIPDGEIIWAPAIDGAF |
| | VLTTRGGDYELTLGQDVSIGYLSHDADTVRLYFQQTMQFLVHTAEA |
| 1492 | MDLLKRELAPILPAAWDLIDHEATRVLKLHLAGRKVVDFRGPFGWEVAAVNT |
| | GRLRAIERKEGPAVSAGVRLVRPLVEFRAPIRLELAELDAVGRGAQEPNIEDV |
| | VRAAEHAAREEDGAIFNGLAAAGIEGILEVAPHKPVVIPAPEAWPRAVAEARE |
| | VLRAAGVDGPYALALGPKAYDELAAAAEDGYPLRKHIEGQLIDGPIVWAPAL |
| | EGGVLLSTRGGDFELTVGEDLSIGYDGHDRQVVELFLTESFTF |
| 1493 | MNNLHRELAPISSAAWEQIEEEVARTFKRSVAGRRVVDVEGPAGPELSAVGT |
| | GHLLDVAAPRELVNARLREVRTIVELTVPFELSRDAIDSVERGARDADWQPAK |
| | EAAQRLAFAEDNAIFDGYPAAGIVGIREGTSNRRLTLPADVGAYPDAISDALE |
| | ALRLAGVDGPYSVVLGSDAYTALSEARDQGYPVLGHIKRIVSGEIIWAPAISGG |
| | CVLSTRGGDYELHLGEDVSIGYTSHTDKGVRLYLRETFTFLMLTSEA |
| 1494 | MNNLHRELAPISSAAWEQIEEEVARTFKRSVAGRRVVDVEGPAGPELSAVGT |
| | GHLLDVAAPRELVNARLREVRTIVELTVPFELSRDAIDSVERGARDADWQPAK |
| | EAAQRLAFAEDNAIFDGYPAAGIVGIREGTSNRRLTLPADVGAYPDAISDALE |
| | ALRLAGVDGPYSVVLGSDAYTALSEARDQGYPVLGHIKRIVSGEIIWAPAISGG |
| | CVLSTRGGDYELHLGEDVSIGYTSHTDKGVRLYLRETFTFLMLTSEA |
| 1495 | MNDLMRDLAPISAKAWAEIETEARGTLTVTLAARKVVDFKGPLGWDASSVSL |
| | GRTEALAEEPKAAGSAAVVTVRKRAVQPLIELCVPFTLKRAELEAIARGASDA |
| | DLDPVIEAARAIAIAEDRAVFHGFAAGGITGIGEASAEHALDLPADLADFPGVL |
| | VRALAVLRDRGVDGPYALVLGRTVYQQLMETTTPGGYPVLQHVRRLFEGPLI |
| | WAPGVDGAMLISQRGGDFELTVGRDFSIGYHDHDAQSVHLYLQESMTFRCLG |
| | PEA |
| 1496 | PQDEWAELREAARQAADSIRVFRRYIPTTRVGRGVEYVPVEREGVRDAVKLV |
| | EISAKFKISQAALDYAKRTGQPLDAGDALRAAAELALEEDRLVAHTLLNLSNA |
| | LKMAATSWDEPGKAVAEVSKAVAELIKAGAPGPYILFVDPARFAKLVSVYEK |
| | TGVMELTRIKAIVKDVVPTPVVPPSAALLISASPQTLDLVIGADTEVEYLGPED |
| | GKHLFRLWETIAVRV |
| 1497 | MNNLHRELAPIASSAWAQIEEEVARTFKRSVAGRRVVDVEGPAGPGLSAVGT |
| | GHLRDVTAPREQVSARLREVRNVVELTVPFELSRDAIDSVERGARDADWQPA |
| | KDAAQRLAFAEDGAIFDGYLAADIVGIREGTSNRKLILPTDVSAYPDAISDALE |
| | ALRLAGVDGPYTVVLGSDAYTALSEARDQGYPVLGHIKRIVSGEIVWAPAISG |
| | GCVLSTRGGDYELHLGEDVSIGYTSHTDKVVRLYLRETFTFLMLTSEA |
| 1498 | RSDLPVNRTLNIIHRAGVKYSLMEDELLLSKHPLSIIERGRKEKASDWDIPGSIA |
| | NDVIRGIQILETNGYTDPVTIISPELYTRLFRVYDKSGTYEIKLVKHATEIIVSPLI |
| | KGLAVVSKKGFYVMENTPAKVEFLGREGINSDYIIWGKIAPYLIDTNA |
| 1499 | MDNLHRKLAPISDAAWAQIEDEAARTLKRYLGARRVVDVHGPEGFGLSAVG |
| | TGHLRPATALAEGVESHRREVNPLLELRVPFTLTRAAIDDVARGSNDSDWQPL |
| | KDAARKIALAEDRLVFLGHGDAGIRGILPETSNPIVALPANVADYPEAVASAV |
| | SELRLAGVNGPYALILGTTAFTAANGGAEDGYPVLKHLERLVDVPVVWSQAL |
| | EGGAVVTTRGGDFDLWLGQDISIGYLSHDAASVTLYLQESLTFQMQTSEA |
| 1500 | KRSFTEYTQVIETVSKNKVFLEQLLLANPKLYDVMQKYNAGLLKKKRVKKLF |
| | ESIYKYYKRSYLRS |
| 1501 | MNNLHRELAPISSSAWEQIEEEVARTFKRSVAGRRVVDVDGPEGPELSAVGTG |
| | HLVEVAAPREQVNARLREVRTIVELTVPLLLSRDAIDSVERGARDADWQPAK |
| | DAAQRLAFAEDGAIFDGYAAASIVGIREGTSNNKLTLPADVSAYPDAISDALE |
| | ALRLAGVDGPYSVVLGSDAYTALSEARDQGYPVLGHIKRIVSGEIIWAPAISGG |
| | CVLSTRGGDYELHLGEDVSIGYTSHTDKVVRLYLRETFTFLMLTSEA |
| 1502 | MDILRRENAQFPASIWSAIEKEAGLVFGKHLTGRKVVDFKGGLGIGFSSLPTGR |
| | VISSKEKLGEASVGVRMNTPVIELKIPFSFPESEVEAILREANAFDISSIEKAAKK |
| | VCVAENELVFYGLKKEGIEGLIPSIPHKPIKAKGDEILPAVAEGIKELVNSEIEGP |
| | YALLIQPQYFGKLFGVAGNSGYPLTLKLAELLQGNNIIVAPALKSGALLVSLRG |
| | GDYELYSGMDIGVGYSEKKSTNHELFFFETLTFRINTPEA |
| 1503 | NIIKWDQQAIPFYETKVQDNAIIQSDKQVPYPLSIINTLFKVMPDLPKEETQPVF |
| | MKAYLTHSRKEDLLIYREHPLSILQRSKKMNRSDWNIPGNIVNDIVRAYEQVL |
| | SSGYSDVNLIIPPYVHALLYRVVDRTGTMEIELLRHLGNIYVSPNVDTIVVISKQ |
| | VLYVYEKKSTTLENLGRDGVYEVYMLSSELAPYVTDPE |
| 1504 | MNNLHRELAPISSAAWEQIEEEVARTFKRSVAGRRVVDVEGPKGPELSAVGT |
| | GHLRDVAAPREHVDARLREVRTIVELTVPFELDRAAIDSVERGARDADWQAA |
| | KEAAQRLAFAEDSAIFDGYPAAGIVGIREGTSNRKLTLPSDVGAYPDAISDALE |
| | ALRLAGVDGPYSVLLGADAYTALSEARDQGYPVIEHIKRIVSGEIIWAPAISGG |
| | CVLSTRGGDYELHLGEDVSIGYASHTDKVVRLYLRETLTFLMLTSEA |
| 1505 | MNNLHRELAPISRAAWSQIEDEVARTFRRSVAGRRVVDVKGPGGTELSGVGT |
| | GHQTAIAAPQQGVVAKLSEVKSLVELTVPFELQREAIDSVVRGAKDADWQPA |
| | KEAAKQLAYAEDRAIFDGYQAAGIGGIREGSSNPSLALPADVSDYPNAISNAL |
| | EQLRLAGVDGPYSVLLGADAYTALGEARDQGYPVIEHIKRIVNGDIIWAPALA |
| | GGSVLSTRGGDFELHLGEDLSIGYTSHTDTVVRLYLRETLTFLMLTSEA |
| 1506 | MNNLYRDLAPISAAAWAQIEEEVARTFKRSVAGRRVVDVKDPGGFGLAAVG |
| | TGHLRGIAAPQKGVDAKLREVKALVELTVPFELQRDEIDAVERGANDADWQP |
| | AKDAATELAYAEDRAIFDGYKAAGIVGIREGSSNSRLELPTDAADYPAAVGRA |
| | LEQLRLAGVDGPYSVLLGADAYTALSEGSDDGYPTIDHIKRIVSGDIIWAPALN |
| | GGCVLSTRGGDFELHLGQDLSIGYQSHTDKVVRLYLRETLTFLMLTSEA |
| 1507 | MNNLYRDLAPISAAAWAQIEEEVARTFKRSVAGRRVVDVKDPGGFGLAAVG |
| | TGHLRGIAAPQKGVDAKLREVKALVELTVPFELQRDEIDAVERGANDADWQP |
| | AKDAATELAYAEDRAIFDGYKAAGIVGIREGSSNSRLELPTDAADYPAAVGRA |
| | LEQLRLAGVDGPYSVLLGADAYTALSEGSDDGYPTIDHIKRIVSGDIIWAPALN |
| | GGCVLSTRGGDFELHLGQDLSIGYQSHTDKVVRLYLRETLTFLMLTSEA |
| 1508 | NNVFQNKEKNYYEAFYTEEKFKKALKVTTPEAYKSLVDLNIQKDSLNRARYG |
| | YIQRATVKTSPLSYFGKTTYYSLNKKDSEETLQLNNVVKYLILTAAMNDVEV |
| | MNLLRIKINPVFKKINN |
| 1509 | IPLIWKDFTLDRRLYEAMRRKNTNVDASAALEAAYTVSSAEEMMILRGITRNG |
| | TTFEKNGLYEGAGQDYSTPKAIGTYGGIQDAVTDVYEMMDDSDVPTDSLRW |
| | NLSMSPNIYNKVNKSRSANDVKEMKDLLELLGTPNNPGNVFKSNTLPSVSTTG |
| 1510 | NSVTCSKNGGFCISPKCLPGSKQIGTCSLPGSKCCK |
| 1511 | RVGDLPPAIRQELEEFDRYINKQHLVATTLQADYGKHDQLINTIPKDINYLHNK |
| | LMSTKQALKFDSGQLVHLKELNNEITDDISKIMQLILQLSTPGTRLSSSFQLNEF |
| | FVKKIKKYYEILRQYEGVVAELDSILGGLERSCTEGFGNLFNIVEVIKSQYHLF |
| | MELCETMAQLHNEVNKLSK |
| 1512 | AIHRALISKRMEGHCEAECLTFEVKIGGCRAELAPFCCKNRKKH |
| 1513 | FFDEKCNKLKGTCKNNCGKNEELIALCQKSLKCCRTIQPCGSIID |
| 1514 | YYGNGLYCNKEKCWVDWNQAKGEIGKIIVNGWV |
| 1515 | QKYYCRVRGGRCAVLSCLPKEEQIGKCSTRGRKCCR |
| 1516 | NPVTCLRSGAICHPGFCPRRYKHIGTCGLSVIKCCK |
| 1517 | DHYNCVRSGGQCLYSACPIYTRIQGTCYHGKAKCCK |
| 1518 | DHYNCVSSGGQCLYSACPIFTKIQGTCYGGKAKCCK |
| 1519 | NPQSCRWNMGVCIPISFLVNMRQIGTCFGPRV |
| 1520 | REYRFHNQLATTEKPEILPRIVSDGIVWARRRWRIRPTDVPRPETGERDVEYLL |
| | RLEGWRTQLGLPAEIYVAQVTPTAMGLRRKKPQWVHFEHPYSLWAAFTHLD |
| | PH |
| 1521 | NPLSCRLNRGICVPIRCPGNLRQIGTCFTPSVKCCR |
| 1522 | MKVLLAITLVAILGVASGTQFSLCQAPSERRHELVNCVKTHLNEQASQKLSEV |
| | KQRLNCEDLDCVFTKICELSSDTHQEHANTFLPDDVKTDVRAALTQCRPSN |
| 1523 | DSYICARKGGTCNLSPCPLYNRVEGTCYRGKAKCCI |
| 1524 | DSYICARKGGTCNLSPCPLYNRIEGTCYRGKAKCCI |
| 1525 | DSYICARKGGTCNLSPCPLYNRIEGTCYRGKAKCCI |
| 1526 | DSYICARKGGTCNLSPCPLYNRVEGTCYRGKAKCCI |
| 1527 | MRPMSIACAVAVIIACVCALQSAALPSEVRLDPEVRLEEPEDSEAARSIDQGVA |
| | AALAKETSPEVLFRTKRQSHLSLCRYCCNCCKNKGCGFCCRF |
| 1528 | MNNLHRELAPIASSAWAQIEEEVARTFKRSVAGRRVVDVEGPAGPGLSAVGT |
| | GHLRDVTAPREQVSARLREVRNVVELTVPFELSRDAIDSVERGARDADWQPA |
| | KDAAQRLAFAEDGAIFDGYLAADIVGIREGTSNRKLTLPTDVSAYPDAISDALE |
| | ALRLAGVDGPYTVVLGSDAYTALSEARDQGYPVLGHIKRIVSGEIVWAPAISG |
| | GCVLSTRGGDYELHLGEDVSIGYTSHTDKVVRLYLRETFTFLMLTSEA |
| 1529 | ARTFKRSVAGRRVVDVEGPGGTELSGVGTGHQTAIAAPQQGVVARLAEVKRL |
| | VEFTVPFELQREAIDSVLRGANDADWQPAKDAAKELAYAEDRAIFDGYQAAG |
| | IGGIREGSSNAPLALPADIGDYPHAIGNALEELRLAGVDGPYSVLLGADAYTAL |
| | SEARDQGYPVIEHIKRIVNGDIIWAPALTGGSVLSTRGGDFELHLGEDLSIGYLS |
| | HTDSVVRLYLRETLTFLMLTSEA |
| 1530 | MNNLHRELAPISSEAWSQIEEEVARTFKRSVAGRRVVDVKGPGGVDLSGVGT |
| | GHQSTIAAPHHGVIAKLSEVKALVQLTVPFELSRDAIDAVERGANDSDWQAA |
| | KDAAKELAYAEDRAIFDGYKAAGIVGIREGSSNTSLALPADVADYPNAIGGAL |
| | QQLRLAGVDGPYSVLLGADAYTALGEASDQGYPVIEHIKRIVNGEIIWAPALE |
| | GGSVLSMRGGDYELHLGQDVSIGYQSHTDSTVRLYLRETLTFLMLTSEA |
| 1531 | NPISCARNRGVCIPIGCLPGMKQIGTCGLPGTKCCR |
| 1532 | QIVNCKKNEGFCQKYCNFMETQVGYCSKKKEACC |
| 1533 | NLHRNLAPVTEVAWQQIGEEAARTFKRHVAGRRVVDVAGPFGYSYSAHNLG |
| | RVTPIKTSDSRIRAQQRQVNPLVELRFPFTLSRAEVDDVARGSLDSDWQPVKD |
| | AAKAVAFAEDQSIFQGFDEAGIRGLGPSSDNPVLSLPEDPLLIPDAVASALSAL |
| | RLAGVEGPYSVVLDADAYTAVSETRDEGHPVFHHLRDLVAGDIIWAPAISGG |
| | YVLSTRGGDNQLTLGTDLSIGYDSHTATDVTLYLEETFTFASLTAEA |
| 1534 | QKYYCRVRGGRCAVLSCLPKEEQIGKCSTRGRKCCR |
| 1535 | NHRSCHRIKGVCAPDRCPRNMRQIGTCFGPPVKCCR |
| 1536 | MFTLKKSLLLLFFLGTISLSLCEEERNAEEERRDYPEERDVEVEKRIIPLPLGYF |
| | AKKT |
| 1537 | FTMKKSLLLLELLGTINFSLC |
| 1538 | DHYICAKKGGTCNFSPCPLFNRIEGTCYSGKAKCCI |
| 1539 | PSVVDQIAKVEDILKRLNLIKRERIQVLKDLKEKILILNKKSIANYEQQLFQQEL |
| | EKYRGFQNRLVQATHKQAALMRELTVAFNGLLQDKRVRAEQSKYESFQRQR |
| | GAVIGRYKRAYQEFLDLEAGLQSAKTWYKEMKETVESLEKNVETFV |
| 1540 | QKYYCRVRGGRCAVLSCLPKEEQIGKCSTRGRKCCR |
| 1541 | IRNPVTCIRSGAICYPRSCPGSYKQIGVCGVSVIKCCKKP |
| 1542 | PDFMIAASDADAVVRGEFTPVLGELHLGVNSLDYAYFARLHPHRDDLLREVD |
| | LDFPRPRLLVMAPMEAGANLVPRTQRALVRPQDHLVALTSRVPFPTRGRPLN |
| | GADLTVAEQPDGWEIRVPGGERFDLMEIFAQPLKTALMARVSFFRDEHLPRIS |
| | FGRLVVVREQWRIAADELAFAAVRDTRDRYVHARRWWRRRDLPTRVFVKSP |
| | LERKPFHVDADSPALVELLCAAVRR |
| 1543 | MNNLHRELAPIASAAWEQIEEEVARTFKRSVAGRRVVDVEGPKGPALSAVGT |
| | GHLRDVDAPREQVSARLREVRAIVELTVPFFLSRDAIDSVERGARDADWQPA |
| | KDAAQRLAFAEDHAIFDGYAAAGIIGIREGSSNRRLTLPDDVGAYPDAISDALE |
| | ALRLAGVDGPYSVLLGADAYTALSEARDQGYPVIDHIKRIVSGEIIWAPAISGG |
| | CVLSTRGGDYELHLGEDVSIGYTSHTDKVVRLYLRETFTFLMLTSEA |
| 1544 | MNNLHRELAPISSAAWEQIEEEVARTFKRSVAGRRVVDVEGPAGPELSAVGT |
| | GHLLDVAAPRELVNARLREVRTIVELTVPFELSRDAIDSVERGARDADWQPAK |
| | EAAQRLAFAEDNAIFDGYPAAGIVGIREGTSNRRLTLPADVGAYPDAISDALE |
| | ALRLAGVDGPYSVVLGSDAYTALSEARDQGYPVLGHIKRIVSGEIIWAPAISGG |
| | CVLSTRGGDYELHLGEDVSIGYTSHTDKGVRLYLRETFTFLMLTSEA |
| 1545 | NNVFQNKEKNYYEAFYTEEKFKKALKVTTPEAYKSLVDLNIQKDSLNRARYG |
| | YIQRATVKTSPLSYFGKTTYYSLNKKDSEETLQLNNVVKYLILTAAMNDVEV |
| | MNLLRIKINPVFKKINN |
| 1546 | QKYYCRVRGGRCAVLTCLPKEEQIGKCSTRGRKCCR |
| 1547 | RDVICLTQHGTCRLFFCHFGERKAEICSDPWNRCC |
| 1548 | DQYICARKGGTCNFSPCPLFTRIDGTCYRGKAKCC |
| 1549 | NPQSCHRNKGICVPIRCPGNMRQIGTCLGPPVKCCR |
| 1550 | NPVSCVRNKAICVPIRSPANMKQIGSCVGRAVKCCR |
| 1551 | GLLSGILGAGKNIVCGLSGLLKLESEII |
| 1552 | GLWDTIKQAGKKFFLNVLDKIRCKVAGGCRT |
| 1553 | VLSYKEAVLRAIDGINQRSSDANLYRLLDLDPRPTMDGDPDTPKPVSFTVKET |
| | VCPRTTQQSPEDCD |
| 1554 | ALSYREAVLRAVDRINERSSEANLYRLLELDPPPKDVEDRGARKPTSFTVKET |
| | VCPRTSPQPPEQCD |
| 1555 | GFMDTAKNVAKNVAVTLLDNLKCKITKAC |
| 1556 | GLLDTFKNLALNAAKSAGVSVLNSLSCKLFKTC |
| 1557 | NSQSCRRNKGICVPIRCPGSMRQIGTCLGAQVKCCR |
| 1558 | VLSYKEAVLRAIDGINQRSSDANLYRLLDLDPRPTMDGDPDTPKPVSFTVKET |
| | VCPRTTQQSPEDCD |
| 1559 | RRWWFR |
| 1560 | RRWFWR |
| 1561 | MKCLQSVLVLVLLLAMVSAQNTNTTNTRIGGFAGGSGLLPGPAIGGGIGIPGG |
| | VLLPGSFQGGISGGIIHQYGLDCSGNSLSPQTGNCRYYLRNPVNRRYYCTRNQ |
| | KPAYKCPLLRPDCPDTRSGPPVECYTDNDCGPLDKCCCDACLDHYVCKPAA |
| 1562 | MLQQSDALHSALREVPLGVGDIPYNDFHVRGPPPVYTNGKKLDGIYQYGHIET |
| | NDNTAQLGGKYRYGEILESEGSIRDLRNSGYRSAENAYGGHRGLGRYRAAPV |
| | GRLHRRELQPGEIPPGVATGAVGPGGLLGTGGMLAADGILAGQGGLLGGGGL |
| | LGDGGLLGGGGVLGVLGEGGILSTVQGITGLRIVELTLPRVSVRLLPGVGVYL |
| | SLYTRVAINGKSLIGFLDIAVEVNITAKVRLTMDRTGYPRLVIERCDTLLGGIK |
| | VKLLRGLLPNLVDNLVNRVLADVLPDLLCPIVDVVLGLVNDQLGLVDSLIPLG |
| | ILGSVQYTFSSLPLVTGEFLELDLNTLVGEAGGGLIDYPLGWPAVSPKPMPELP |
| | PMGDNTKSQLAMSANFLGSVLTLLQKQHALDLDITNGMFEELPPLTTATLGA |
| | LIPKVFQQYPESCPLIIRIQVLNPPSVMLQKDKALVKVLATAEVMVSQPKDLET |
| | TICLIDVDTEFLASFSTEGDKLMIDAKLEKTSLNLRTSNVGNFDIGLMEVLVEKI |
| | FDLAFMPAMNAVLGSGVPLPKILNIDFSNADIDVLEDLLVLSA |
| 1563 | FIGAILPAIAGLVGGLINR |
| 1564 | FIGAILPAIAGLVHGLINR |
| 1565 | MNNLHRELAPVSASAWQQIEEEVARTFKRSVAGRRVVDVEGPAGPALSAVGT |
| | GHLCDVAAPRELVSARLREVRTIVELTVPFELSRDAIDSVERGARDADWQPAK |
| | DAAQRLAFAEDGAIFDGYAAAGIVGIREGTSNRKLALPADVSAYPDAISDALE |
| | ALRLAGVDGPYSVVLGSDAYTALSEARDQGYPVLGHIKRIVSGEIIWAPAISGG |
| | CVLSTRGGDYELHLGEDVSIGYTSHTDKVVRLYLRETLTFLMLTGEA |
| 1566 | MNFTKLFIMVAIAVLLIAGIQPVEAAPRMEIGKRREKLGRNVFKAAKKALPVI |
| | AGYKALG |
| 1567 | MKVASVCILLAVLLCSAAVADATVYAYASTCARCKSIGAKYCGYGTLRTKGV |
| | SCDGQTMIRSCADCKARFGRCVDSYITECFL |
| 1568 | AFEPHEERALQDERQTKGHRLKRQFSLNFGATHEDGYGTDVNAEALANLWK |
| | SASGNTKLEGSASYMQHFGGVGGDGKARISGNLLFSHNY |
| 1569 | NPQSCRWNMGVCIPISCPGNMRQIGTCFGPRVPCCR |
| 1570 | FLSLALAALPKFLCLVFKKC |
| 1571 | RIVDCKRSEGFCQEYCNYLETQVGYCSKKKDACC |
| 1572 | PQSCHRNKGVCVPIRCPRSMRQIGTCLGAPVKCCR |
| 1573 | KRSFTEYTQVIETVSKNKVFLEQLLLANPKLYDVMQKYNAGLLKKKRVKKLF |
| | ESIYKYYKRSYLRSTPFGLFSETSIGVFSKSSQYKLMGKTTKGIRLDTQWLIRLV |
| | HKMEVDFSKKLSFTRNNANYKFGDRVFQVYT |
| 1574 | GFGVGDSACAAHCIARRNRGGYCNAKTVCVC |
| 1575 | MSETEAEASVIGHELFHKYTGRDDMIDKPGLLKMLQDNFPNFLAACDKKGTD |
| | YLANVFEKKDKNRDKKIDFSEFLSLLGDIATDYHKQSHGAPACSEGDQ |
| 1576 | RWKFFKKIEKVGQNIRDGIIKAGPAVAVVGQAAAIS |
| 1577 | PDFKLPGMKYPIPATTPPFVPKRSRFPIYA |
| 1578 | MNFKKILFFVFACLVFTVTAAPEPRWKFFKKIEKVGQNIRDGIIKAGPAVAVV |
| | GQAAAISGK |
| 1579 | MKTFSVAVAVAVVLTFICLQESSAVSFTEVQELEEPMSNGSPVAAYEEMSEES |
| | WKMPYASRRWRCRFCCRCCPRMRGCGLCCQRR |
| 1580 | LQDAALGWGRRCPRCPPCPRCSWCPRCPTCPRCNCNPK |
| 1581 | LQDAALGWGRRCPRCPPCPRCSWCPRCPTCPGCNCNPK |
| 1582 | LQDAAVGWGRRCPQCPRCPSCPSCPRCPRCPRCKCNPK |
| 1583 | LQDAAVGWGRRCPQCPRCPSCPSCPRCPRCPRCKCNPK |
| 1584 | LQDAAVGWGRRCPQCPRCPSCPSCPRCPRCPRCKCNPK |
| 1585 | SPLSCRGNRGVCLPIRCPGRLRQIGTCFGPRVPCCR |
| 1586 | DDSIQCFQKNNTCHTNQCPYFQDEIGTCYDKRGKCCQKRLLHIRVPRKKKV |
| 1587 | CLASPSVFRRLTDPPGDARGRRRLAASLHRYLMRAVGRATPNGLWAGI |
| 1588 | KQIASKITIYQGKELQLFRKLVELKLLRQCITIPNNRGIITSIIQFLEEYEVGKEIIP |
| | LLEELHAALHSFEKSSSFERINDWNEIKRILSLLQKGDKKVGSEIIYEDVIFKDV |
| | RKDTITPKIRKSFLEGLADFILLFDVNVRVQYEIAQLFYEKYGKSTEKLSNSNLL |
| | NEVFFREIHQFYPYYQNQKYRYKEAKAKEIQQLDELRDQFLKEFESLILNVDQ |
| | SVEVIDIELLIEKYTSLIPEYIKKDSNISYTLFLQETTDENIVLNNVYDGQEKFISR |
| | FKDFFMPHYETKEYSNYIERVLNEDNCYEVDELFGFNGGIHERKSHNIVNLDV |
| | GYQRFNHKDAKQVRDFKVRYNTERKKIEFLDDNYKICNLVYKSSLVPMFLPGI |
| | LSVMLYLFQSGRLNFDITSLVKEENYVPRITFGNVVLSRKKWKVIMEDLKDIL |
| | ESKLE |
| 1589 | HPDIVDYFMKRHNWHFKFFHYEEDDKIKGAYFICNDQNIGILTRRTFPLSSDEI |
| | LIPMAPDLRCFLPDRTNRLSALHQPQIRNAIWKLTRKKQNCLVKEAFSSKFEKT |
| | RRNEYQRFLKKGGSVKSVADCSSDELTHIFIELFRSRFGNTSSCYPADNLANFF |
| | SQLHHLLFGHILYIEGIPCAFDIVLKSESQMNVYFDVSNGAIKNECRPLSPGSIL |
| | MWLN |
| 1590 | HPDVVSYFMIHHDWKFDFFHYEKDGDIKGSYFLCNGKQIGIMARRSYPLSSDE |
| | VLIPFSPHARCFFPDKTNKLSIINKQNIINATWKIARKKQNCIIKESFSPKFEKTR |
| | RNEIQRFIRNGGEIKCISQLSDKEISSSYISLFHSRFGGTLPCYEYDNLLMFISHLR |
| | ELMFGHVLFWDNKPCAIDIVLKSESSCNVYYDVPNGAVLNDENCMKLSPGSV |
| | LMWLN |
| 1591 | HPDIVDYFMKRHNWHFKFFHYKEDDKIKGAYFICNDQNIGILTRRTFPLSSDEI |
| | LIPMAPDLRCFLPDRTNRLSALHQPQIRNAIWKLTRKKQNCLVKETFSSKFEKR |
| | RRNEYQQFLKKGGSVKSVADCSSDELTHIFIELFQSRFGNTLSCYPADNLATFF |
| | SQLHHLLFGHILYIEGIPCAFDIVLKSESQMNVYFDVSNGAIKNEFRPLSPGSIL |
| | MWLN |
| 1592 | KNDAKSIIISEEDFKDVDFTNANLPHSFAIKFNVLNAETEKIQLDAIAGATANLL |
| | IGRFGHGNAAIAEIINEITEHEELQANDSILAEIVHLPESRIGNILSRPEMRNYEM |
| | AYLAKSNKENQFQIKISDLYVSVRNGNIILRSKALNKQIIP |
| 1593 | DPVTCLKSGAICHPVFCPRRYKQIGTCGLPGTKCCK |
| 1594 | IINGSDCDMHTQPWQAALLLRPNQLYCGAVLVHPQWLLTAAHCRKKVFRVR |
| | LGHYSLSPVYESGQQMFQGVKSIPHPGYSHPGHSNDLMLIKLNRRIRPTKDVR |
| | PINVSSHCPSAGTKCLVSGWGTTKSPQVHFPKVLQCLNISVLSQKRCEDAYPR |
| | QIDDTMFCAGDKAGRDSCQGDSGGPVVCNGSLQGLVSWGDYPCARPNRPGV |
| | YTNLCKFTKWIQETIQANS |
| 1595 | MNNLHRELAPISAAAWAQIEEEVARTFKRSVAGRRVVDVEEPGGVELSGVGT |
| | GHLHTIAAPRERVGAKLREVKALVEFTVPFLLRRDAIDAVERGARDADWQPA |
| | KDAAQRLAFVEDSAIFDGYPAAGIVGIREATSNRKIALPSDVGAYPGAIGDAVE |
| | ALRLAGVDGPYSVLLGADAYTALAEAREHGYPVLDHIKRIVSGEIVWAPALS |
| | GGCVLSTRGGDFALHLGEDVSIGYRSHNDEVVHLYLRETFTFLMLTSEA |
| 1596 | AIHRALISKRMEGHCEAECLTFEVKIGGCRAELAPFCCKNRKKH |
| 1597 | GLDFSQPFPSGEFAVCESCKLGRGKCRKECLENEKPDGNCRLNFLCCRQRI |
| 1598 | FIGSALKVLAGVLPSIVSWVKQ |
| 1599 | MLRVLMMSLLVVAALGHISPPRPEGCNYYCKKPEGPNKGSNYCCGPEYIPLK |
| | REEKHAGNCPPPLKECTRFPRPPQVCPHDGHCPYNQKCCFDTCLDIHTCKPAH |
| | FYIN |
| 1600 | MRVCVMVLALVVVTMARSPPFRPLSCPRPKVDIPGCVNTCQAKDKPGFFYCC |
| | DSKGLNAGTCPKVHLQPYERNVLCDRTQFNYPNHLNCKDDEDCQVFLKCCY |
| | LPDNHQLICRNSEDI |
| 1601 | MKVLAVSLAFLLIAGLISTSLAQNEEGGEKELVRVRRGGYYCPFFQDKCHRHC |
| | RSFGRKAGYCGGFLKKTCICVMK |
| 1602 | IEGRFKCRRWQWRMKKLGAPSITCVRRAF |
| 1603 | MFKCRRWQWRMKKLGAPSITCVRRAF |
| 1604 | GKIPVKAIKKAGTAIGKGLRAINIASTAHDVYSFFKPKHKKKH |
| 1605 | MKVFFLFAVLFCLVRRNSVHISHQEARGP |
| 1606 | PHQTGQLTDLRAQDTAGAEAGLQPTLQLRRLRRRDTHFPICIFCCGCCKTPKC |
| | GLCCIT |
| 1607 | MKFFALFSFFVLCVALATAGHLGRPYIGGGGGFNRGGGFHRGGGFHRGGGFH |
| | SGGGFHRGGGFHSGGSFGYRG |
| 1608 | MSTPKWNLSISRAVICVIALFASMICAAAHFVGGIHTNAGYVGWYHPDYYNH |
| | DVIGVGNYHPGYGWVAPVYATPTYIIGNTGYNCQTVQQCDSEGNCIQSQNCD |
| 1609 | SLWLLLLGLVLPSASAQALSYREAVLRAVDRINDGSSEANLYRLLELDPPPKD |
| | VEDRGARKPASFRVKETVCPRTSQQPLEQCDFKENGLV |
| 1610 | AMSLVSCSTAAPAKIPIKAIKTVGKAVGKGLRAINIASTANDVFNFLKPKKRKH |
| 1611 | AMSLVSCSTAAPAKIPIKAIKTVGKAVGKGLRAINIASTANDVFNFLKPKKRKH |
| 1612 | MEGLFNAIKDTVTAAINNDGAKLGTSIVSIVENGVGLLGKLFGF |
| 1613 | MTGLAEAIANTVQAAQQHDSVKLGTSIVDIVANGVGLLGKLFGF |
| 1614 | MLQGRQFRSCQSYLRQRGNVLEMATGNPQSQTVEECCESLKDIERKQQQCGC |
| | EAIKHAMRQMQGGQSEEVYRKARMLPRTCGLRSQQCQFNVIFV |
| 1615 | PHQTGQLTDLRAQDTAGAEAGLQPTLQLRRLRRRDTHFPICIFCCGCCKTPKC |
| | GFCCKT |
| 1616 | MNFSRALFYVFAVFLVCASVMAAPEPRWKIFKKIEKVGQNIRDGIIKAGPAVA |
| | VVGQAATIAHGK |
| 1617 | PMFKCWRWQWRWKKLGAM |
| 1618 | MKVLAVSLAFLLIAGLISTSLAENDEGGEKELVRVRRGGYYCPFRQDKCHRHC |
| | RSFGRKAGYCGGFLKKTCICV |
| 1619 | MTGLAEAIANTVQAAQQHDSVKLGTSIVDIVANGVGLLGKLFGF |
| 1620 | SKWFTPNHAACAAHCILLGNRGGHCVGTVCHCR |
| 1621 | RRWQWRGIGKFLHSAKKF |
| 1622 | MDKKAANGGKEKGPLEACWDEWSRCTGWSSAGTGVLWKSCDDQCKKLGK |
| | SGGECVLTPSTCPFTRTDKAYQCQCKK |
| 1623 | AKIPIKAIKTVGKAVGKGLRAINIASTANDVFNFLEPKKRKH |
| 1624 | MKALLILGLLLFSVAVQGKVFERCELARSLKRFGMDNFRGISLAN |
| 1625 | MKALLILGLLLFSVAVQGKVFERCELARSLKRFGMDNFRGITLAN |
| 1626 | GCVWPDGKAITTHKLQTTMQETKALIMGYFKSIATGGAMMAKPQEQLTPVIY |
| | PAV |
| 1627 | GCVWPDGKAITTHKLQTTMLETKALIMGYFKSIATGGAMMAKPQEQLTPVIY |
| | PAV |
| 1628 | GCVWPDGKAITTHKLQTTMLETKALIMGYFKSIATGGAMMATQDGAVTPVIY |
| | PAV |
| 1629 | MRLLWLLVAMVVTVLAAATPTAAWQRPLTRPRPFSRPRPYRPNYG |
| 1630 | MFTLKKSLLLLFFLGTINLSLCEEERNADEERRDDPEERAVEVEKRILPILSLIG |
| | GLLGK |
| 1631 | NWVKQAPGKGLKWMGWIRTNTGEPTYVDDFKGRFAFSLETSASTAFLQINNL |
| | KNEDTATYFCAITTATSDYYAMDYWGQGTSVTVSS |
| 1632 | MEIKYLLTVFLVLLIVSDHCQAFLFSLIPSAISGLISAFKGKRRRDLNAQIDQFK |
| | NFRKRDAELEELLSKLPIY |
| 1633 | MEIKYLLTVFLVLLIVSDHCQAFLFSLIPSAISGLISAFKGRRKRDLNGQIDHFK |
| | NFRKRDAELEELLSKLPIY |
| 1634 | DKLIGSCVWGAVNYTSDCNGECLLRGYKGGHCGSFANVNCWCET |
| 1635 | XTYNGKCYKKDNICKYKAQSGKTAICKCYVKKCPRDGAKCEFDSYKGKCYC |
| 1636 | RGGRLCYCRGWICFCVGR |

[0093] Antimicrobial peptides may be classified by their activity (i.e., the organism in which the AMP functions as a defense mechanism). For example, antiviral AMPs have activity against viruses, antifungal AMPs have activity against fungi. The following remaining AMP classes are recognized: anticancer/tumor AMPs; anti-protist AMPs; antiparasitic AMPs; insecticidal AMPs; spermicidal AMPs; anti-HIV-1 AMPs and chemotactic AMPs. For purposes of this disclosure, insecticidal AMPs will be a focus, and all other classes of AMPs will be described, generally, as non-insecticidal AMPs.

[0094] The AMPs for use within the invention include natural or synthetic, peptides, or protein analogs, peptide or protein mimetics, and chemically modified derivatives or salts of active peptides or proteins. The AMPs may be mutants that are readily obtainable by partial substitution, addition, or deletion of amino acids within a naturally occurring or native (e.g., wild-type, naturally occurring mutant, or allelic variant) peptide or protein amino acid sequence. Additionally, biologically active fragments of native peptides or proteins are included. Such mutant derivatives and fragments substantially retain the desired activity of the native peptide or proteins. In the case of peptides or proteins having carbohydrate chains, biologically active variants marked by alterations in these carbohydrate species are also included within the invention.

[0095] It is understood by one of ordinary skill in the art that the nucleotide sequence that encodes for the amino acid sequence of any of the AMPs identified herein may be deduced from the amino acid sequence. For purposes of transgenic algae, the deduced nucleotide sequence may be modified to reflect codon bias depending on the algae species used.

[0096] Any one or combination of the AMPs of the present invention may be selected or combined to yield effective agents for controlling, inhibiting, reducing and/or preventing rotifer growth within the methods and compositions of the invention.

[0097] B. Transgenic Algae

[0098] Methods for the transformation of various types of algae are known to those skilled in the art. See, for example, Radakovits et al., Eukaryotic Cell, 9, 486-501 (2010), which is incorporated herein by reference. The transformation of the chloroplast genome was the earliest method and is well documented in the literature (Kindle et al., Proc Natl Acad Sci USA, 88, p. 1721-1725 (1991)). A variety of methods have been used to transfer DNA into microalgal cells, including, but not limited to, agitation in the presence of glass beads or silicon carbide whiskers, electroporation, biolistic microparticle bombardment, and Agrobacterium tumefaciens-mediated gene transfer. A preferred method of transformation for the present invention is biolistic microparticle bombardment, carried out with a device referred to as a “gene gun.”

[0099] Different regions of the algae may be targeted for transformation in different embodiments of the invention. Target regions include the nuclear genome, the mitochondrial genome, and the chloroplast genome. The preferred target region can vary depending on the gene being expressed. For example, if an algae has been modified to express a lethal gene that is obtained from a bacterium, it may be preferable to express the lethal gene in the chloroplast or mitochondrion, as these organelles evolved from bacteria and retain many similarities. This can be achieved using a chloroplast expression vector that employs 2 intergenic regions of the chloroplast genome that flank and drive the site-specific integration of a transgene cassette (5′ untranslated region, or 5′ UTR followed by the coding sequence of the protein to be expressed which can drive the biological function desired, followed by a 3′ UTR). The 5′ UTR contains a cis acting site that allows for docking of the RNA polymerase, which drives transcription of the transgene. The 3′ UTR contains sequence that allows for the correct termination of the transcription by RNA polymerase. However, in other cases, expression can be achieved with a gene cassette that employs a eukaryotic promoter sequence upstream of the protein coding sequence and a eukaryotic termination sequence downstream of the protein coding sequence. Suitable algae promoters include, but are not limited to, an endogenous algal promoter or hybrid promoter systems that are capable of driving expression of a transcript in algae.

[0100] Genetically modified algae can be transformed to include an expression cassette. An expression cassette is made up of one or more genes and the sequences controlling their expression. The three main components of a nuclear expression cassette are a promoter sequence, an open reading frame expressing the gene, and a 3′ untranslated region, which may contain a polyadenylation signal. The cassette is part of vector DNA used for transformation. The promoter is operably linked to the gene expressed represented by the open reading frame.

[0101] The following examples are provided to illustrate certain particular features and/or embodiments. These examples should not be construed to limit the disclosure to the particular features or embodiments described.

### EXAMPLES

### Example 1

### Synthesis of Antimicrobial Peptides

[0102] This example provides a list of exemplary AMPs that were synthesized and assessed for their ability to control, inhibit, reduce and/or prevent rotifer growth.

[0103] The AMPs of this example were commercially synthesized by GENSCRIPT™. Briefly, solid phase peptide synthesis was employed using Fmoc as a protecting group. Piperidine was used to remove the Fmoc protecting group. Peptides were synthesized from C-terminal to N-terminal, and dicyclohexylcarbodiimide (DCC) was used as the activating agent. Finally, upon completion of synthesizing the individual peptides, a TFA wash was employed to remove the peptide from the column.

[0104] In general, the exemplary AMPs provided below in Table 2 vary in length from 13 to 56 amino acids (i.e., “Total # A.A.” column), and originate from a diverse set of organisms including arthropods (e.g., insects), amphibians, fish and mammals (“Origin” column). Further, the column identified as “Activity” in Table 2 provides the known organism(s) for which the activity of the AMP is harmful to (i.e., control, inhibit, reduce and/or prevent growth). The “G+” indicates that the AMP has activity against Gram-positive bacteria, and the “G−” indicates that the AMP has activity against Gram-negative bacteria. As the “Activity” column indicates, as single AMP may have broad activity spectrum against multiple organisms.

TABLE 2

| | | | Total | |
|---|---|---|---|---|
| Peptide Name | Amino Acid Sequence | Origin | #A.A. | Activity |
| Ponericin G1 | GWKDWAKKAGGWLKKKGPGMA | Pachycondyla | 30 | G+; G−; Fungi; |
| | KAALKAAMQ (SEQ ID NO: 232) | goeldii (Ant) | | Insects |
| Ponericin G3 | GWKDWLNKGKEWLKKKGPGIMK | Pachycondyla | 30 | G+; G−; Fungi; |
| | AALKAATQ (SEQ ID NO: 234) | goeldii (Ant) | | Insects |
| Ponericin G4 | DFKDWMKTAGEWLKKKGPGILK | Pachycondyla | 29 | G+; G−; Fungi; |
| | AAMAAAT (SEQ ID NO: 235) | goeldii (Ant) | | Insects |
| Ponericin G6 | GLVDVLGKVGGLIKKLLP (SEQ ID | Pachycondyla | 18 | G+; G−; |
| | NO: 1637) | goeldii (Ant) | | Insects |
| Ponericin L2 | LLKELWTKIKGAGKAVLGKIKGLL | Pachycondyla | 24 | G+; G−; Virus; |
| | (SEQ ID NO: 240) | goeldii (Ant) | | Fungi; Insects, |
| | | | | HIV |
| Ponericin W1 | WLGSALKIGAKLLPSVVGLFKKK | Pachycondyla | 25 | G+; G−; Fungi; |
| | KQ (SEQ ID NO: 241) | goeldii (Ant) | | Insects, |
| | | | | Mammalian |
| | | | | cells |
| Ponericin W3 | GIWGTLAKIGIKAVPRVISMLKKK | Pachycondyla | 26 | G+; G−; Fungi; |
| | KQ (SEQ ID NO: 243) | goeldii (Ant) | | Insects, |
| | | | | Mammalian |
| | | | | cells |
| Ponericin W4 | GIWGTALKWGVKLLPKLVGMAQ | Pachycondyla | 26 | G+; G−; Fungi; |
| | TKKQ (SEQ ID NO: 244) | goeldii (Ant) | | Insects, |
| | | | | Mammalian |
| | | | | cells |
| Ponericin W5 | FWGALIKGAAKLIPSVVGLFKKKQ | Pachycondyla | 24 | G+; G−; Fungi; |
| | (SEQ ID NO: 245) | goeldii (Ant) | | Insects,; |
| | | | | Mammalian |
| | | | | cells |
| Ponericin W6 | FIGTALGIASAIPAIVKLFK (SEQ ID | Pachycondyla | 20 | G+; Insects, |
| | NO: 246) | goeldii (Ant) | | Mammalian |
| | | | | cells |
| Im-1 | FSFKRLKGFAKKLWNSKLARKIRT | Scorpion | 56 | G+; G−; |
| | KGLKYVKNFAKDMLSEGEEAPPA | venom | | Insects |
| | AEPPVEAPQ (SEQ ID NO: 1638) | | | |
| Cupiennin 1D | GFGSLFKFLAKKVAKTVAKQAAK | Cupiennius | 35 | G+; G−; |
| | QGAKYVANKHME (SEQ ID NO: | salei (Spider) | | Insects |
| | 1639) | | | |
| Lycotoxin I | IWLTALKFLGKHAAKHLAKQQLS | Wolf spider | 25 | G+; G−; Fungi; |
| | KL (SEQ ID NO: 1640) | | | Insects |
| Melittin | GIGAVLKVLTTGLPALISWIKRKR | Honeybee | 26 | G+; G−; Virus; |
| | QQ | venom | | Fungi; |
| | (SEQ ID NO: 1641) | | | Parasites |
| Piscidin 1 | FFHHIFRGIVHVGKTIHRLVTG | Striped Bass | 22 | G+; G−; Virus; |
| | (SEQ ID NO: 802) | | | Fungi |
| Piscidin 2 | FFHHIFRGIVHVGKTIHKLVTG | Striped Bass | 22 | Virus; Fungi; |
| | (SEQ ID NO: 1642) | | | Parasites |
| Piscidin 3 | FIHHIFRGIVHAGRSIGRFLTG (SEQ | Striped Bass | 22 | G+; G−; Virus; |
| | ID NO:803) | | | Fungi; |
| W16-CA(1-8)-MA(1-12) | KWKLFKKIGIGKFLHWAKKF (SEQ | Hybrid AMP | 20 | Virus |
| Hybrid CecropinA(1-8)- | ID NO: 1643) | | | |
| Magainin2(1-12) | | | | |
| Temporin A | FLPLIGRVLSGIL (SEQ ID NO: 32) | European | 13 | G+; Virus |
| | | common frog | | |
| Temporin-F | FLPLIGKVLSGIL (SEQ ID NO: 36) | European | 13 | G+; G- |
| | | common frog | | |
| Temporin-G | FFPVIGRILNGIL (SEQ ID NO: | European | 13 | G+; G- |
| | 1644) | common frog | | |
| Temporin-L | FVQWFSKFLGRIL (SEQ ID NO: | European | 13 | G+; G−; Fungi |
| | 248) | common frog | | |
| MsrA3 | MASRHMFLPLIGRVLSGIL (SEQ ID | Hybrid AMP | 19 | G−; Fungi |
| | NO: 1645) | | | |
| Cecropin A | KWKLFKKIEKVGQNIRDGIIKAGP | Hybrid AMP | 37 | G+; G−; Virus; |
| | AVAVVGQATQIAK (SEQ ID NO: | | | Parasites |
| | 62) | | | |
| Cecropin B | KWKVFKKIEKMGRNIRNGIVKAG | Giant Silk | 35 | G+; G−; Virus |
| | PAIAVLGEAKAL (SEQ ID NO: 64) | moth | | |
| Magainin 2 | GIGKFLHSAKKFGKAFVGEIMNS | African | 23 | G+; G−; Virus; |
| | (SEQ ID NO: 122) | clawed frog | | Fungi; |
| | | | | Parasites |
| Tachyplesin I | KWCFRVCYRGICYRRCR (SEQ ID | Asian | 17 | G+; G−; Virus |
| | NO: 144) | horseshoe | | |
| | | crab | | |
| Lactoferricin B | FKCRRWQWRMKKLGAPSITCVRR | Cattle | 25 | G+; G−; Virus; |
| | AF | | | Fungi; |
| | (SEQ ID NO: 1646) | | | |
| Dermaseptin-S1 | ALWKTMLKKLGTMALHAGKAAL | Leaf frog | 34 | G+; G−; Virus; |
| | GAAADTISQGTQ (SEQ ID NO: | | | Fungi; |
| | 1647) | | | Parasites |

### Example 2

### Minimal Inhibitory Concentration (MIC) of Antimicrobial Peptides on Algae

[0105] This example provides the minimal inhibitory concentration (MIC) of antimicrobial peptides (AMPs) for algae. The significance of determining the MIC of AMPs for algae relates to the need of having a biocontrol agent (i.e., AMP) for rotifers that does not cause harm to algae. Therefore, the tolerance of algae to the AMPs listed in Table 2 of Example 1 was measured.

[0106] Briefly, the algae viability assay used herein measured the “health” of the algae cultures by looking at the color of the algae. A change in color from green algae to brown algae indicates that the algae are negatively impacted and likely no longer viable. A visual assay was used to determine the MIC for the individual AMPs on the algae. In each case, a light microscope with 20× magnification was used to observe algae color.

[0107] The effect of insecticidal and non-insecticidal AMPs on three different algae species was measured. The three algae species were Auxenochlorella protothecoides, Chlorella sorokiniana and Chlamydomonas reinhardtii.

[0108] Algae cultures were initiated in 96-well plates at an OD 750 of approximately 0.1. Individual algae cultures were incubated with a select AMP at concentrations of 7.8 μg/mL, 15.6 μg/mL, 31.2 μg/mL, 62.5 μg/mL, 0.125 mg/mL, 0.25 mg/mL, 0.5 mg/mL and 1 mg/mL to determine the MIC for individual AMPs against the three different algae species for 5-6 days at room temperature on a continuous lit shaker. The antibiotics hygromycin and paromycin served as positive controls for inhibiting and/or reducing the growth rate of algae. Algae cultured in water or media served as a negative control (i.e., no effect on growth). The algae cultures were monitored by preparing microscopy slides with a small sample taken from the individual wells. The algae slides were then visualized under a 20× magnification microscope for algae viability as measured by algae color.

[0109] A summary of the MIC, provided in molar concentration, for each insecticidal and non-insecticidal AMP incubated with the three different algae species is provided below in Table 3 (insecticidal AMPs) and Table 4 (non-insecticidal AMPs). The “ND” indicates that the AMP killed all the algae.

TABLE 3

| | Minimal Inhibitory Concentration (MIC) of | | | | | |
|---|---|---|---|---|---|---|
| AMP | Insecticidal AMPs for Three Different Algae Species | | | | | |
| (SEQ ID | Chlorella | | Chlorella | | Chlamydomonas | |
| NO: #) | protothecoides | | sorokiana | | reinhardtii | |
| Cupiennin 1D | 16.5 | μM | 65.9 | μM | 32.9 | μM |
| (1639) | | | | | | |
| Im-1 | 9.9 | μM | 19.7 | μM | 9.9 | μM |
| (1638) | | | | | | |
| Lycotoxin-1 | 44 | μM | 88 | μM | 22 | μM |
| (1640) | | | | | | |
| Ponericin G1 | 78 | μM | 155.8 | μM | 19.5 | μM |
| (232) | | | | | | |
| Ponericin G3 | 37 | μM | 37 | μM | 9.2 | μM |
| (234) | | | | | | |
| Ponericin G4 | 158 | μM | 79 | μM | 19.8 | μM |
| (235) | | | | | | |
| Ponericin G6 | 274.9 | μM | 274.9 | μM | 17.2 | μM |
| (1637) | | | | | | |
| Ponericin L2 | 48.5 | μM | 97 | μM | 12.1 | μM |
| (240) | | | | | | |
| Ponericin W1 | 23.1 | μM | 46.1 | μM | 11.5 | μM |
| (241) | | | | | | |
| Ponericin W3 | 21.8 | μM | 87.3 | μM | 5.5 | μM |
| (243) | | | | | | |
| Ponericin W4 | 43.8 | μM | 87.6 | μM | 11 | μM |
| (244) | | | | | | |
| Ponericin W5 | 12 | μM | 24 | μM | 12 | μM |
| (245) | | | | | | |

| | | | | | |
|---|---|---|---|---|---|
| Ponericin W6 | No Affect | 492.5 | μM | 61.6 | μM |
| (246) | | | | | |

[0110] The data in Table 3 indicates that the insecticidal AMPs (13 AMPs) had an MIC for the three algae species in range of about 5.5 μM to about 493 μM. A higher concentration (or MIC) indicates that the algae species is more tolerant of the AMP.

TABLE 4

| | Minimal Inhibitory Concentration (MIC) of Non- | | | | | |
|---|---|---|---|---|---|---|
| AMP | Insecticidal AMPs for Three Different Algae Species | | | | | |
| (SEQ ID | Chlorella | | Chlorella | | Chlamydomonas | |
| NO: #) | protothecoides | | sorokiana | | reinhardtii | |
| Melittin | 11 | μM | 11 | μM | ND (kills) | |
| (1641) | | | | | | |
| Piscidin 1 | 12.2 | μM | 24.3 | μM | 12.2 | μM |
| (802) | | | | | | |
| Piscidin 2 | 24.6 | μM | 24.6 | μM | 12.3 | μM |
| (1642) | | | | | | |
| Piscidin 3 | 200.7 | μM | 100.3 | μM | 50.2 | μM |
| (803) | | | | | | |
| W16-CA(1- | ND (kills) | | 25 | μM | 12.5 | μM |
| 8)-MA(1- | | | | | | |
| 12) (1643) | | | | | | |
| Temporin A | 715.4 | μM | 715.4 | μM | 89.4 | μM |
| (32) | | | | | | |
| Temporin F | 365 | μM | 730.7 | μM | 91.3 | μM |
| (36) | | | | | | |
| Temporin G | 171.4 | μM | 342.8 | μM | 85.7 | μM |
| (1644) | | | | | | |
| Temporin L | 76.2 | μM | 38.1 | μM | 19 | μM |
| (248) | | | | | | |
| MsrA3 | 59.2 | μM | NT | | 29.6 | μM |
| (1645) | | | | | | |
| Cecropin A | 124.9 | μM | 124.9 | μM | 15.6 | μM |
| (62) | | | | | | |
| Cecropin B | 65.2 | μM | 130.4 | μM | 16.3 | μM |
| (64) | | | | | | |
| Magainin 2 | 101.3 | μM | 50.7 | μM | 6.3 | μM |
| (122) | | | | | | |

| | | | | | |
|---|---|---|---|---|---|
| Tachyplesin | 6.9 | μM | ND (kills) | 13.8 | μM |
| I (144) | | | | | |

| | | | | |
|---|---|---|---|---|
| Lactoferricin | ND (kills) | ND (kills) | ~10 | μM |
| B (1646) | | | | |

| | | | | | |
|---|---|---|---|---|---|
| Dermaseptin- | 18.1 | μM | 36.9 | μM | ND (kills) |
| S1 (1647) | | | | | |

[0111] The data in Table 4 indicates that the insecticidal AMPs (16 AMPs) had an MIC for the three algae species in range of about 6 μM to about 731 μM. A higher concentration (or MIC) indicates that the algae species is more tolerant of the AMP.

### Example 3

### Effect of Antimicrobial Peptides (AMPs) on Rotifer Motility

[0112] This example demonstrates the effect of antimicrobial peptides (AMPs) on rotifer motility and viability.

[0113] Briefly, the rotifer motility assay used herein in the presence of a biocontrol agent (e.g., AMP) may be used as a measure of relative rotifer viability and competency. Rotifer diet, of which algae is considered to be an important food source, is one of the key environmental factors that impact the growth and multiplication of rotifers. In effect, the inability of a rotifer to be mobile (i.e., inability to swim toward a food source and/or to have mobile cilia that help trap food) prevents the rotifer from ingesting sufficient nutrients to further grow and reproduce. Thus, any approach that reduces and/or inhibits rotifer motility has a significant impact on an individual rotifer and therefore rotifer populations. With respect to algae cultures, reducing and/or inhibiting rotifer motility prevents and/or reduces any negative impact rotifers have on algae cultures (e.g., open pond systems for algae biomass and biofuel production). In other words, reducing and/or inhibiting rotifer motility reduces and/or prevents rotifers (e.g., infestations) from ingesting and consequently damaging algae cultures use in biofuel production. In general, antimicrobial peptides (AMPs) were shown to have a negative impact on rotifer motility and viability, and therefore a negative impact on limiting rotifers proliferation and population growth.

[0114] The effect of the insecticidal and non-insecticidal AMPs of Table 2 (Example 1) on three different rotifer species was measured. The three rotifer species were Adineta vaga and Philodina acuticornis (class Bdelloid rotifers), and Brachionus (Monogononta class). A visual motility assay was used to determine the impact of the individual AMPs on rotifer viability. In each case, a light microscope with 20× magnification was used to observe rotifer motility (activity). FIG. 1 shows a side-by-side comparison of AMP treated and AMP untreated Adineta vaga, Philodina acuticornis and Brachionus rotifers. FIGS. 1A, 1C and 1E show a 20× magnification of Adineta vaga, Philodina acuticornis and Brachionus (untreated), respectively. FIGS. 1B, 1D and 1F show a 20× magnification of Adineta vaga, Philodina acuticornis and Brachionus (AMP treated), respectively. The rotifers in FIGS. 1B, 1D and 1F had limited to no mobility, the morphology of the rotifers treated with AMPs compared to the untreated rotifers (FIGS. 1A, 1C and 1E) indicates that the rotifers are unhealthy and/or dead.

[0115] Rotifer cultures were initiated in 12-well or 24-well plates at a density of approximately 100-200 rotifers/mL. The 12-well plates contained a volume of 1 mL per well, and the 24-well plates contained a volume of about 0.25 mL to about 0.35 mL per well. Individual rotifer cultures (individual wells) were incubated with a select AMP at a concentration of 0.5 mg/mL (or a range of about 78 μM to about 365 μM) for 18, 21 and 24 hours at room temperature. The rotifer cultures were monitored by preparing microscopy slides with a small sample taken from the individual wells. The slides were then visualized under a 20× magnification microscope for rotifer motility. The range of visual motility was assessed as follows: a non-motile rotifer (no movement observed) was scored as “+++” (high negative impact of AMP on rotifer motility); a rotifer with limited motility (compared to rotifers not treated with an AMP) was scored as “++” (medium negative impact of AMP on rotifer motility); a rotifer with motility slightly below that of a non-treated AMP rotifer was scored as “+” (low negative impact of AMP on rotifer motility); and a rotifer having motility comparable to a rotifer not treated with an AMP was scored as “no kill” (“NK”) (no negative impact of AMP on rotifer motility). The scoring system was based on observing a subset of the rotifer population from each well. The impact on the subset of rotifers observed served as a representative of the impact on the entire rotifer population for that particular AMP treatment.

[0116] A summary of the motility assay (or “Kill Assay”) for each insecticidal and non-insecticidal AMP incubated with the three different rotifer species for the 24 hour time point is provided below in Table 5 (insecticidal AMPs) and Table 6 (non-insecticidal AMPs). The 18 and 21 hour time points gave similar results to the 24 hour time point.

TABLE 5

| | | | “Kill” Efficiency of Insecticidal AMPs | | |
|---|---|---|---|---|---|
| AMP | Molar | | for Three Different Rotifer Species | | |
| (SEQ ID | Concentration | | (24 hr time point) | | |
| NO: #) | at 0.5 mg/mL | | Philodina | Adineta vaga | Brachionus |
| Cupiennin 1D | 131.7 | μM | +++ | +++ | +++/++ |
| (1639) | | | | | |
| Im-1 | 78.8 | μM | +++ | +++ | +++ |
| (1638) | | | | | |
| Lycotoxin-1 | 175.8 | μM | +++ | +++ | +++ |
| (1640) | | | | | |
| Ponericin G1 | 155.75 | μM | +++ | +++ | +++ |
| (232) | | | | | |
| Ponericin G3 | 147.8 | μM | +++ | +++ | +++ |
| (234) | | | | | |
| Ponericin G4 | 158 | μM | +++/++ | +++/++ | +++/++ |
| (235) | | | | | |
| Ponericin G6 | 274.85 | μM | +++/++ | +++/++ | +++ |
| (1637) | | | | | |
| Ponericin L2 | 193.95 | μM | +++ | +++ | +++/++ |
| (240) | | | | | |
| Ponericin W1 | 184.5 | μM | +++ | +++ | +++ |
| (241) | | | | | |
| Ponericin W3 | 174.55 | μM | +++ | +++ | +++ |
| (243) | | | | | |
| Ponericin W4 | 175.3 | μM | +++ | +++ | +++ |
| (244) | | | | | |
| Ponericin W5 | 192.15 | μM | +++ | +++ | +++ |
| (245) | | | | | |
| Ponericin W6 | 246.25 | μM | ++ | ++ | +++ |
| (246) | | | | | |

[0117] The data in Table 5 indicates that the insecticidal AMPs (13 AMPs) had a medium (“++”) to high (“+++”) negative impact on the motility, and therefore viability, of all three rotifer species. Twelve of the 13 AMPs had a high negative impact on all three rotifer species.

TABLE 6

| | | | “Kill” Efficiency of Non-Insecticidal | | |
|---|---|---|---|---|---|
| AMP | Molar | | AMPs at 0.5 mg/mL for Three Different | | |
| (SEQ ID | Concentration | | Rotifer Species (24 hr time point) | | |
| NO: #) | at 0.5 mg/mL | | Philodina | Adineta vaga | Brachionus |
| Melittin | 175.6 | μM | +++ | +++ | +++/++ |
| (1641) | | | | | |
| Piscidin 1 | 194.4 | μM | +++ | +++ | +++ |
| (802) | | | | | |
| Piscidin 2 | 196.5 | μM | +++ | +++ | +++ |
| (1642) | | | | | |
| Piscidin 3 | 200.65 | μM | +++ | +++ | +++ |
| (803) | | | | | |
| W16-CA(1- | 199.7 | μM | +++ | +++ | + |
| 8)-MA(1- | | | | | |
| 12) (1643) | | | | | |
| Temporin A | 357.72 | μM | NK | + | ++ |
| (32) | | | | | |
| Temporin F | 365 | μM | NK | NK | +/++ |
| (36) | | | | | |
| Temporin G | 342.75 | μM | NK | NK | + |
| (1644) | | | | | |
| Temporin L | 304.7 | μM | +++ | +++ | +++ |
| (248) | | | | | |
| MsrA3 | 236.8 | μM | +++ | +++ | + |
| (1645) | | | | | |
| Cecropin A | 124.85 | μM | ++ | +++ | ++/+++ |
| (62) | | | | | |
| Cecropin B | 130.35 | μM | +++/++ | +++ | ++/+++ |
| (64) | | | | | |
| Magainin 2 | 202.7 | μM | +++ | +++ | + |
| (122) | | | | | |
| Tachyplesin | 220.4 | μM | +++ | +++/++ | NK |
| I (144) | | | | | |
| Lactoferricin | 160 | μM | +++ | +++ | +++ |
| B (1646) | | | | | |
| Dermaseptin- | 144.7 | μM | +++ | +++ | +++ |
| S1 (1647) | | | | | |

[0118] The data in Table 6 indicates that the non-insecticidal AMPs (16 AMPs) had greater range of impact on the motility, and therefore viability, of the three rotifer species when compared to the insecticidal AMPs of Table 5. The impact of the non-insecticidal AMPs on rotifers ranged from “no kill” (“NK”), or no negative impact on motility (viability), to high (“+++”) negative impact on motility (viability) for all three rotifer species. In the cases where a single rotifer species was not impacted negatively by the presence of an AMP, one or more of the other rotifer species were negatively impacted (see for example Temporin-F in Table 6). Thirteen of the 16 AMPs had at least a high negative impact (“+++”) on motility (viability) in at least one rotifer species.

[0119] In summary, these data indicate that the introduction of an AMP (insecticidal or non-insecticidal) has a negative impact on the motility, and therefore viability, of one or more rotifer species. Moreover, in comparing the AMP concentrations of Tables 3 and 4 (algae viability/tolerance of the AMP) with the AMP concentrations of Tables 5 and 6 (rotifer motility), there are overlapping concentrations of AMP indicating where the AMP has a negative impact on the motility, and therefore viability of a rotifer, yet algae are tolerant to the AMP, and remain viable. By way of example, the AMPs Ponericin W6, Temporin A and Temporin F, are highly tolerated by algae, but have a high negative impact on rotifer motility, and therefore viability.

[0120] These data indicate that AMPs may be useful in removing and/or preventing rotifer infestations in algae cultivations by reducing and/or inhibiting rotifer motility, and therefore controlling, inhibiting, reducing and/or preventing rotifer growth.

### Example 4

### Expression Vector for Transgenic Algae Expressing an AMP

[0121] This example provides an exemplary expression vector that can be used to engineer transgenic algae to express an antimicrobial peptide (AMP).

[0122] An exemplary expression vector (pCPSR24) is shown in FIG. 2. Each antimicrobial peptide encoding sequence is codon-optimized for the algae species in which the expression vector is introduced. Further, an additional start codon (ATG encoding the amino acid methionine) is introduced into the AMP nucleotide sequence. The AMP nucleotide sequence is cloned into the vector multiple cloning site (MCS) via the NheI and AvrII restriction enzyme sites. The AMP nucleotide sequence is operably linked to a promoter (e.g., LacZ), which will drive the expression of the AMP in the algae.

[0123] The following nucleotide sequences encoding an AMP are cloned into the pCPSR24 vector via the NheI and AvrII restrictions sites:

M-Ponericin G4 (codon optimized for C. proto-
thecoides)
(SEQ ID NO: 1648)
GCTAGCATGGACTTCAAGGACTGGATGAAGACCGCCGGCGAGTGGCTGAA
GAAGAAGGGCCCCGGCATCCTGAAGGCCGCCATGGCCGCCGCCACCTGAC
CTAGG
M-Ponericin W3 (codon optimized for C. proto-
thecoides)
(SEQ ID NO: 1649)
GCTAGCATGGGCATCTGGGGCACCCTGGCCAAGATCGGCATCAAGGCCGT
GCCCCGCGTGATCAGCATGCTGAAGAAGAAGAAGCAGTGACCTAGG
M-Ponericin W6 (codon optimized for C. proto-
thecoides)
(SEQ ID NO: 1650)
GCTAGCATGTTCATCGGCACCGCCCTGGGCATCGCCAGCGCCATCCCCGC
CATCGTGAAGCTGTTCAAGTGACCTAGG
M-Ponericin G6 (codon optimized for C. proto-
thecoides)
(SEQ ID NO: 1651)
GCTAGCATGGGCCTGGTGGACGTGCTGGGCAAGGTGGGCGGCCTGATCAA
GAAGCTGCTGCCCTGACCTAGG

[0124] The expression vector is transformed into the algae, which then express the AMP. The algae expressing the AMP have a defense to rotifers, whereby the AMP inhibits, reduces and/or prevents rotifer growth, thus preventing rotifer infestation from damaging the algae.

[0125] In view of the many possible embodiments to which the principles of the disclosed invention may be applied, it should be recognized that the illustrated embodiments are only preferred examples of the invention and should not be taken as limiting the scope of the invention. Rather, the scope of the invention is defined by the following claims. We therefore claim as our invention all that comes within the scope and spirit of these claims.

The application's sequence listing, which the Patent Office published only in electronic form, follows.

SEQUENCE LISTING (1651 sequences)

SEQ ID NO: 1 - protein, 36 aa, Artificial Sequence
  Synthetic polypeptide
SIGTAVKKAVPIAKKVGKVAIPIAKAVLSVVGQLVG

SEQ ID NO: 2 - protein, 48 aa, Artificial Sequence
  Synthetic polypeptide
ELDRICGYGTARCRKKCRSQEYRIGRCPNTYACCLRKWDESLLNRTKP

SEQ ID NO: 3 - protein, 24 aa, Artificial Sequence
  Synthetic polypeptide
GLKDKFKSMGEKLKQYIQTWKAKF

SEQ ID NO: 4 - skipped

SEQ ID NO: 5 - protein, 42 aa, Artificial Sequence
  Synthetic polypeptide
RFRPPIRRPPIRPPFYPPFRPPIRPPIFPPIRPPFRPPLRFP

SEQ ID NO: 6 - protein, 20 aa, Artificial Sequence
  Synthetic polypeptide
ICIFCCGCCHRSKCGMCCKT

SEQ ID NO: 7 - protein, 20 aa, Artificial Sequence
  Synthetic polypeptide
FLSLLPSIVSGAVSLAKKLG

SEQ ID NO: 8 - protein, 8 aa, Artificial Sequence
  Synthetic polypeptide
VRPYLVAF

SEQ ID NO: 9 - protein, 10 aa, Artificial Sequence
  Synthetic polypeptide
KTCENLADTY

SEQ ID NO: 10 - protein, 38 aa, Artificial Sequence
  Synthetic polypeptide
GPLSCRRNGGVCIPIRCPGPMRQIGTCFGRPVKCCRSW

SEQ ID NO: 11 - protein, 13 aa, Artificial Sequence
  Synthetic polypeptide
FLPIIAKLLGGLL

SEQ ID NO: 12 - protein, 13 aa, Artificial Sequence
  Synthetic polypeptide
FLPIPRPILLGLL

SEQ ID NO: 13 - protein, 13 aa, Artificial Sequence
  Synthetic polypeptide
FLIIRRPIVLGLL

SEQ ID NO: 14 - protein, 23 aa, Artificial Sequence
  Synthetic polypeptide
GLHKVMREVLGYERNSYKKFFLR

SEQ ID NO: 15 - protein, 17 aa, Artificial Sequence
  Synthetic polypeptide
INWKKIAEVGGKILSSL

SEQ ID NO: 16 - protein, 14 aa, Artificial Sequence
  Synthetic polypeptide
INWKGIAAMAKKLL

SEQ ID NO: 17 - protein, 17 aa, Artificial Sequence
  Synthetic polypeptide
INWKKIAEIGKQVLSAL

SEQ ID NO: 18 - protein, 13 aa, Artificial Sequence
  Synthetic polypeptide
INWKGIAAMKKLL

SEQ ID NO: 19 - protein, 10 aa, Artificial Sequence
  Synthetic polypeptide
SNDIYFNFQR

SEQ ID NO: 20 - protein, 24 aa, Artificial Sequence
  Synthetic polypeptide
FLPMLAGLAANFLPKLFCKITKKC

SEQ ID NO: 21 - protein, 24 aa, Artificial Sequence
  Synthetic polypeptide
FLPLAVSLAANFLPKLFCKITKKC

SEQ ID NO: 22 - protein, 24 aa, Artificial Sequence
  Synthetic polypeptide
FLPMLAGLAANLLPKLFCKITKKC

SEQ ID NO: 23 - protein, 24 aa, Artificial Sequence
  Synthetic polypeptide
FLPMLAGLAANFLPELFCKITKKC

SEQ ID NO: 24 - protein, 16 aa, Artificial Sequence
  Synthetic polypeptide
FLPIVGKLLSGLSGLL

SEQ ID NO: 25 - protein, 13 aa, Artificial Sequence
  Synthetic polypeptide
FLPIVGKLLSGLL

SEQ ID NO: 26 - protein, 13 aa, Artificial Sequence
  Synthetic polypeptide
LLPIVGKLLSGLL

SEQ ID NO: 27 - protein, 14 aa, Artificial Sequence
  Synthetic polypeptide
IDWKKLLDAAKQIL

SEQ ID NO: 28 - protein, 12 aa, Artificial Sequence
  Synthetic polypeptide
ILGTILGLLKSL

SEQ ID NO: 29 - protein, 55 aa, Artificial Sequence
  Synthetic polypeptide
KQATVGDINTERPGILDLKGKAKWDAWNGLKGTSKEDAMKAYINKVEELKKKYGI

SEQ ID NO: 30 - protein, 14 aa, Artificial Sequence
  Synthetic polypeptide
RPRPNYRPRPIYRP

SEQ ID NO: 31 - protein, 25 aa, Artificial Sequence
  Synthetic polypeptide
GLLSVLGSVAKHVLPHVVPVIAEKL

SEQ ID NO: 32 - protein, 13 aa, Artificial Sequence
  Synthetic polypeptide
FLPLIGRVLSGIL

SEQ ID NO: 33 - protein, 13 aa, Artificial Sequence
  Synthetic polypeptide
LLPILGNLLNGLL

SEQ ID NO: 34 - protein, 13 aa, Artificial Sequence
  Synthetic polypeptide
LLPIVGNLLNSLL

SEQ ID NO: 35 - protein, 13 aa, Artificial Sequence
  Synthetic polypeptide
VLPIIGNLLNSLL

SEQ ID NO: 36 - protein, 13 aa, Artificial Sequence
  Synthetic polypeptide
FLPLIGKVLSGIL

SEQ ID NO: 37 - protein, 36 aa, Artificial Sequence
  Synthetic polypeptide
RNIICLMQHGTCRLFFCRSGEKKSEICSDPWNRCCI

SEQ ID NO: 38 - protein, 25 aa, Artificial Sequence
  Synthetic polypeptide
GLWSTIKNVGKEAAIAAGKAALGAL

SEQ ID NO: 39 - protein, 118 aa, Artificial Sequence
  Synthetic polypeptide
NLYQFKNMIQCAGTQLCVAYVKYGCYCGPGGTGTPLDQLDRCCQTHDHCYDNAKKFGNCIPYFKTYEYTCNKPDLTCTDAKGSCARNVCDCDRAAAICFAAAPYNLANFGINKETHCQ

SEQ ID NO: 40 - skipped

SEQ ID NO: 41 - protein, 27 aa, Artificial Sequence
  Synthetic polypeptide
GIGASILSAGKSALKGLAKGLAEHFAN

SEQ ID NO: 42 - protein, 27 aa, Artificial Sequence
  Synthetic polypeptide
GIGSAILSAGKSALKGLAKGLAEHFAN

SEQ ID NO: 43 - protein, 25 aa, Artificial Sequence
  Synthetic polypeptide
GIGAAILSAGKSALKGLAKGLAEHF

SEQ ID NO: 44 - skipped

SEQ ID NO: 45 - protein, 27 aa, Artificial Sequence
  Synthetic polypeptide
GIGGALLSAAKVGLKGLAKGLAEHFAN

SEQ ID NO: 46 - protein, 25 aa, Artificial Sequence
  Synthetic polypeptide
SMWSGMWRRKLKKLRNALKKKLKGE

SEQ ID NO: 47 - protein, 26 aa, Artificial Sequence
  Synthetic polypeptide
GLFGKLIKKFGRKAISYAVKKARGKH

SEQ ID NO: 48 - protein, 26 aa, Artificial Sequence
  Synthetic polypeptide
GLFGKLIKKFGRKAISYAVKKARGKN

SEQ ID NO: 49 - protein, 20 aa, Artificial Sequence
  Synthetic polypeptide
SWKSMAKKLKEYMEKLKQRA

SEQ ID NO: 50 - protein, 20 aa, Artificial Sequence
  Synthetic polypeptide
SWASMAKKLKEYMEKLKQRA

SEQ ID NO: 51 - protein, 24 aa, Artificial Sequence
  Synthetic polypeptide
GLKDKFKSMGEKLKQYIQTWKAKF

SEQ ID NO: 52 - protein, 24 aa, Artificial Sequence
  Synthetic polypeptide
SLKDKVKSMGEKLKQYIQTWKAKF

SEQ ID NO: 53 - protein, 28 aa, Artificial Sequence
  Synthetic polypeptide
GFFGKMKEYFKKFGASFKRRFANLKKRL

SEQ ID NO: 54 - protein, 43 aa, Artificial Sequence
  Synthetic polypeptide
TKYYGNGVYCNSKKCWVDWGTAQGCIDVVIGQLGGGIPGKGKC

SEQ ID NO: 55 - protein, 27 aa, Artificial Sequence
  Synthetic polypeptide
AGETHTVMINHAGRGAPKLVVGGKKLS

SEQ ID NO: 56 - protein, 48 aa, Artificial Sequence
  Synthetic polypeptide
SDEKASPDRHHRFSLSRYAKLANRLSKWIGNRGNRLANPKLLETFKSV

SEQ ID NO: 57 - protein, 31 aa, Artificial Sequence
  Synthetic polypeptide
SWLSKTAKKLENSAKKRISEGIAIAIQGGPR

SEQ ID NO: 58 - protein, 37 aa, Artificial Sequence
  Synthetic polypeptide
WNPFKELERAGQRVRDAVISAAPAVATVGQAAAIARG

SEQ ID NO: 59 - protein, 37 aa, Artificial Sequence
  Synthetic polypeptide
WNPFKELERAGQRVRDAIISAGPAVATVGQAAAIARG

SEQ ID NO: 60 - protein, 37 aa, Artificial Sequence
  Synthetic polypeptide
WNPFKELERAGQRVRDAIISAAPAVATVGQAAAIARG

SEQ ID NO: 61 - protein, 37 aa, Artificial Sequence
  Synthetic polypeptide
WNPFKELERAGQRVRDAVISAAAVATVGQAAAIARGG

SEQ ID NO: 62 - protein, 37 aa, Artificial Sequence
  Synthetic polypeptide
KWKLFKKIEKVGQNIRDGIIKAGPAVAVVGQATQIAK

SEQ ID NO: 63 - protein, 35 aa, Artificial Sequence
  Synthetic polypeptide
KWKIFKKIEKVGRNIRNGIIKAGPAVAVLGEAKAL

SEQ ID NO: 64 - protein, 35 aa, Artificial Sequence
  Synthetic polypeptide
KWKVFKKIEKMGRNIRNGIVKAGPAIAVLGEAKAL

SEQ ID NO: 65 - protein, 36 aa, Artificial Sequence
  Synthetic polypeptide
WNPFKELERAGQRVRDAIISAGPAVATVAQATALAK

SEQ ID NO: 66 - protein, 36 aa, Artificial Sequence
  Synthetic polypeptide
WNPFKELEKVGQRVRDAVISAGPAVATVAQATALAK

SEQ ID NO: 67 - protein, 25 aa, Artificial Sequence
  Synthetic polypeptide
LSCKRGTCHFGRCPSHLIKGSCSGG

SEQ ID NO: 68 - protein, 55 aa, Artificial Sequence
  Synthetic polypeptide
RRIRPRPPRLPRPRPRPLPFPRPGPRPIPRPLPFPRPGPRPIPRPLPFPRPGPRP

SEQ ID NO: 69 - protein, 40 aa, Artificial Sequence
  Synthetic polypeptide
VRNHVTCRINRGFCVPIRCPGRTRQIGTCFGPRIKCCRSW

SEQ ID NO: 70 - protein, 38 aa, Artificial Sequence
  Synthetic polypeptide
VRNFVTCRINRGFCVPIRCPGHRRQIGTCLGPQIKCCR

SEQ ID NO: 71 - protein, 38 aa, Artificial Sequence
  Synthetic polypeptide
GPLSCGRNGGVCIPIRCPVPMRQIGTCFGRPVKCCRSW

SEQ ID NO: 72 - protein, 42 aa, Artificial Sequence
  Synthetic polypeptide
SGISGPLSCGRNGGVCIPIRCPVPMRQIGTCFGRPVKCCRSW

SEQ ID NO: 73 - protein, 74 aa, Artificial Sequence
  Synthetic polypeptide
SLQGGAPNFPQPSQQNGGWQVSPDLGRDDKGNTRGQIEIQNKGKDHDFNAGWGKVIRGPNKAKPTWHVGGTYRR

SEQ ID NO: 74 - skipped

SEQ ID NO: 75 - protein, 44 aa, Artificial Sequence
  Synthetic polypeptide
DCLSGRYKGPCAVWDNETCRRVCKEEGRSSGHCSPSLKCWCEGC

SEQ ID NO: 76 - protein, 33 aa, Artificial Sequence
  Synthetic polypeptide
SLFSLIKAGAKFLGKNLLKQGACYAACKASKQC

SEQ ID NO: 77 - protein, 33 aa, Artificial Sequence
  Synthetic polypeptide
GIMSIVKDVAKNAAKEAAKGALSTLSCKLAKTC

SEQ ID NO: 78 - protein, 33 aa, Artificial Sequence
  Synthetic polypeptide
GIMSIVKDVAKTAAKEAAKGALSTLSCKLAKTC

SEQ ID NO: 79 - protein, 24 aa, Artificial Sequence
  Synthetic polypeptide
FLPLLAGLAANFLPTIICKISYKC

SEQ ID NO: 80 - skipped

SEQ ID NO: 81 - protein, 20 aa, Artificial Sequence
  Synthetic polypeptide
GLRKRLRKFRNKIKEKLKKI

SEQ ID NO: 82 - protein, 13 aa, Artificial Sequence
  Synthetic polypeptide
FLPLILRKIVTAL

SEQ ID NO: 83 - protein, 35 aa, Artificial Sequence
  Synthetic polypeptide
LRDLVCYCRSRGCKGRERMNGTCRKGHLLYTLCCR

SEQ ID NO: 84 - protein, 33 aa, Artificial Sequence
  Synthetic polypeptide
VVCACRRALCLPRERRAGFCRIRGRIHPLCCRR

SEQ ID NO: 85 - protein, 33 aa, Artificial Sequence
  Synthetic polypeptide
VVCACRRALCLPLERRAGFCRIRGRIHPLCCRR

SEQ ID NO: 86 - protein, 38 aa, Artificial Sequence
  Synthetic polypeptide
GFGCPLDQMQCHRHCQTITGRSGGYCSGPLKLTCTCYR

SEQ ID NO: 87 - protein, 20 aa, Artificial Sequence
  Synthetic polypeptide
ACAAHCLLRGNRGGYCNGKG

SEQ ID NO: 88 - skipped

SEQ ID NO: 89 - protein, 13 aa, Artificial Sequence
  Synthetic polypeptide
FLPLLASLFSRLL

SEQ ID NO: 90 - protein, 15 aa, Artificial Sequence
  Synthetic polypeptide
FLPLIGKILGTILGK

SEQ ID NO: 91 - protein, 13 aa, Artificial Sequence
  Synthetic polypeptide
FLPLLASLFSRLF

SEQ ID NO: 92 - protein, 19 aa, Artificial Sequence
  Synthetic polypeptide
FLPVILPVIGKLLNGILGK

SEQ ID NO: 93 - skipped

SEQ ID NO: 94 - protein, 36 aa, Artificial Sequence
  Synthetic polypeptide
ISDYSIAMDKIRQQDFVNWLLAQKGKKSDWKHNITQ

SEQ ID NO: 95 - protein, 69 aa, Artificial Sequence
  Synthetic polypeptide
KAVAAKKSPKKAKKPATPKKAAKSPKKVKKPAAAAKKAAKSPKKATKAAKPKAAKPKAAKAKKAAPKKK

SEQ ID NO: 96 - protein, 13 aa, Artificial Sequence
  Synthetic polypeptide
FLPLLFGAISHLL

SEQ ID NO: 97 - protein, 12 aa, Artificial Sequence
  Synthetic polypeptide
AERVGAGAPVYL

SEQ ID NO: 98 - protein, 23 aa, Artificial Sequence
  Synthetic polypeptide
FLPLVRGAAKLIPSVVCAISKRC

SEQ ID NO: 99 - protein, 34 aa, Artificial Sequence
  Synthetic polypeptide
GFSSLFKAGAKYLLKSVGKAGAQQLACKAANNCA

SEQ ID NO: 100 - protein, 30 aa, Artificial Sequence
  Synthetic polypeptide
GVITDALKGAAKTVAAELLRKAHCKLTNSC

SEQ ID NO: 101 - protein, 31 aa, Artificial Sequence
  Synthetic polypeptide
SIWEGIKNAGKGFLVSILDKVRCKVAGGCNP

SEQ ID NO: 102 - protein, 25 aa, Artificial Sequence
  Synthetic polypeptide
GLFSVLGSVAKHLLPHVAPIIAEKL

SEQ ID NO: 103 - protein, 25 aa, Artificial Sequence
  Synthetic polypeptide
GLFSVLGSVAKHLLPHVVPVIAEKL

SEQ ID NO: 104 - protein, 25 aa, Artificial Sequence
  Synthetic polypeptide
GLFKVLGSVAKHLLPHVAPIIAEKL

SEQ ID NO: 105 - protein, 22 aa, Artificial Sequence
  Synthetic polypeptide
GLWEKVKEKANELVSGIVEGVK

SEQ ID NO: 106 - protein, 46 aa, Artificial Sequence
  Synthetic polypeptide
GLFSKFNKKKIKSGLIKIIKTAGKEAGLEALRTGIDVIGCKIKGEC

SEQ ID NO: 107 - protein, 46 aa, Artificial Sequence
  Synthetic polypeptide
GLFSKFNKKKIKSGLFKIIKTAGKEAGLEALRTGIDVIGCKIKGEC

SEQ ID NO: 108 - protein, 37 aa, Artificial Sequence
  Synthetic polypeptide
GFFSLIKGVAKIATKGLAKNLGKMGLDLVGCKISKEC

SEQ ID NO: 109 - protein, 26 aa, Artificial Sequence
  Synthetic polypeptide
VIDDLKKVAKKVRRELLCKKHHKKLN

SEQ ID NO: 110 - protein, 29 aa, Artificial Sequence
  Synthetic polypeptide
GFISTVKNLATNVAGTVIDTIKCKVTGGC

SEQ ID NO: 111 - protein, 28 aa, Artificial Sequence
  Synthetic polypeptide
AIMDTIKDTAKTVAVGLLNKLKCKITGC

SEQ ID NO: 112 - protein, 28 aa, Artificial Sequence
  Synthetic polypeptide
GIMDTIKDTAKTVAVGLLNKLKCKITGC

SEQ ID NO: 113 - protein, 32 aa, Artificial Sequence
  Synthetic polypeptide
DSHAKRHHGYKRKFHEKHHSHRGYRSNYLYDN

SEQ ID NO: 114 - protein, 15 aa, Artificial Sequence
  Synthetic polypeptide
ALLHHGLNCAKGVLA

SEQ ID NO: 115 - protein, 18 aa, Artificial Sequence
  Synthetic polypeptide
WLNALLHHGLNCAKGVLA

SEQ ID NO: 116 - protein, 41 aa, Artificial Sequence
  Synthetic polypeptide
GILDTIKSIASKVWNSKTVQDLKRKGINWVANKLGVSPQAA

SEQ ID NO: 117 - protein, 34 aa, Artificial Sequence
  Synthetic polypeptide
ITSISLCTPGCKTGALMGCNMKTATCHCSIHVSK

SEQ ID NO: 118-119 - skipped (2 entries)

SEQ ID NO: 120 - protein, 40 aa, Artificial Sequence
  Synthetic polypeptide
QVVRNPQSCRWNMGVCIPISCPGNMRQIGTCFGPRVPCCR

SEQ ID NO: 121 - protein, 23 aa, Artificial Sequence
  Synthetic polypeptide
GIGKFLHSAGKFGKAFVGEIMKS

SEQ ID NO: 122 - protein, 23 aa, Artificial Sequence
  Synthetic polypeptide
GIGKFLHSAKKFGKAFVGEIMNS

SEQ ID NO: 123 - protein, 33 aa, Artificial Sequence
  Synthetic polypeptide
RSGRGECRRQCLRRHEGQPWETQECMRRCRRRG

SEQ ID NO: 124 - protein, 26 aa, Artificial Sequence
  Synthetic polypeptide
ACHAHCQSVGRRGGYCGNFRMTCYCY

SEQ ID NO: 125 - protein, 24 aa, Artificial Sequence
  Synthetic polypeptide
NCIQQCVSKGAQGGYCTNEKCTCY

SEQ ID NO: 126 - protein, 18 aa, Artificial Sequence
  Synthetic polypeptide
GRFKRFRKKFKKLFKKLS

SEQ ID NO: 127 - protein, 18 aa, Artificial Sequence
  Synthetic polypeptide
GGLRSLGRKILRAWKKYG

SEQ ID NO: 128 - protein, 29 aa, Artificial Sequence
  Synthetic polypeptide
FAEPTBSEEEGESYSKEVPEMEKRYGGFM

SEQ ID NO: 129 - protein, 66 aa, Artificial Sequence
  Synthetic polypeptide
AELRCMCIKTTSGIHPKNIQSLEVIGKGTHCNQVEVIATLKDGRKICLDPDAPRIKKIVQKKLAGD

SEQ ID NO: 130 - protein, 18 aa, Artificial Sequence
  Synthetic polypeptide
RRWCFRVCYRGFCYRKCR

SEQ ID NO: 131 - protein, 18 aa, Artificial Sequence
  Synthetic polypeptide
RRWCFRVCYKGFCYRKCR

SEQ ID NO: 132 - protein, 11 aa, Artificial Sequence
  Synthetic polypeptide
FCTMIPIPRCY

SEQ ID NO: 133 - protein, 12 aa, Artificial Sequence
  Synthetic polypeptide
RVCFAIPLPICH

SEQ ID NO: 134 - protein, 12 aa, Artificial Sequence
  Synthetic polypeptide
RVCYAIPLPICY

SEQ ID NO: 135 - protein, 11 aa, Artificial Sequence
  Synthetic polypeptide
RVCYAIPLPIC

SEQ ID NO: 136 - protein, 29 aa, Artificial Sequence
  Synthetic polypeptide
SIGSALKKALPVAKKIGKIALPIAKAALP

SEQ ID NO: 137 - protein, 39 aa, Artificial Sequence
  Synthetic polypeptide
GWLKKIGKKIERVGQHTRDATIQGLGIAQQAANVAATAR

SEQ ID NO: 138 - protein, 39 aa, Artificial Sequence
  Synthetic polypeptide
GWLKKIGKKIERVGQHTRDATIQVIGVAQQAANVAATAR

SEQ ID NO: 139 - protein, 39 aa, Artificial Sequence
  Synthetic polypeptide
GWLRKIGKKIERVGQHTRDATIQVLGIAQQAANVAATAR

SEQ ID NO: 140 - protein, 40 aa, Artificial Sequence
  Synthetic polypeptide
GWIRDFGKRIERVGQHTRDATIQTIAVAQQAANVAATLKG

SEQ ID NO: 141 - protein, 42 aa, Artificial Sequence
  Synthetic polypeptide
QGVRNHVTCRIYGGFCVPIRCPGRTRQIGTCFGRPVKCCRRW

SEQ ID NO: 142 - protein, 40 aa, Artificial Sequence
  Synthetic polypeptide
QGVRNFVTCRINRGFCVPIRCPGHRRQIGTCLGPRIKCCR

SEQ ID NO: 143 - protein, 31 aa, Artificial Sequence
  Synthetic polypeptide
RRCICTTRTCRFPYRRLGTCLFQNRVYTFCC

SEQ ID NO: 144 - protein, 17 aa, Artificial Sequence
  Synthetic polypeptide
KWCFRVCYRGICYRRCR

SEQ ID NO: 145 - protein, 17 aa, Artificial Sequence
  Synthetic polypeptide
RWCFRVCYRGICYRKCR

SEQ ID NO: 146 - protein, 17 aa, Artificial Sequence
  Synthetic polypeptide
KWCFRVCYRGICYRKCR

SEQ ID NO: 147 - protein, 38 aa, Artificial Sequence
  Synthetic polypeptide
NPVSCVRNKGICVPIRCPGSMKQIGTCVGRAVKCCRKK

SEQ ID NO: 148 - protein, 19 aa, Artificial Sequence
  Synthetic polypeptide
AGFAAQAAASLAPVAAQQL

SEQ ID NO: 149 - protein, 47 aa, Artificial Sequence
  Synthetic polypeptide
KSCCRNTWARNCYNVCRLPGTISREICAKKCDCKIISGTTCPSDYPK

SEQ ID NO: 150 - protein, 32 aa, Artificial Sequence
  Synthetic polypeptide
SLGSFLKGVGTTLASVGKVVSDQFGKLLQAGQ

SEQ ID NO: 151 - protein, 28 aa, Artificial Sequence
  Synthetic polypeptide
ALWKNMLKGIGKLAGQAALGAVKTLVGA

SEQ ID NO: 152 - protein, 28 aa, Artificial Sequence
  Synthetic polypeptide
ALWKDILKNVGKAAGKAVLNTVTDMVNQ

SEQ ID NO: 153 - protein, 19 aa, Artificial Sequence
  Synthetic polypeptide
GWMSKIASGIGTFLSGMQQ

SEQ ID NO: 154 - protein, 36 aa, Artificial Sequence
  Synthetic polypeptide
ACNFQSCWATCQAQHSIYFRRAFCDRSQCKCVFVRG

SEQ ID NO: 155 - protein, 20 aa, Artificial Sequence
  Synthetic polypeptide
EWEPVQNGGSSYYMVPRIWA

SEQ ID NO: 156 - skipped

SEQ ID NO: 157 - protein, 18 aa, Artificial Sequence
  Synthetic polypeptide
GKLQAFLAKMKEIAAQTL

SEQ ID NO: 158 - protein, 18 aa, Artificial Sequence
  Synthetic polypeptide
GRLQAFLAKMKEIAAQTL

SEQ ID NO: 159 - protein, 39 aa, Artificial Sequence
  Synthetic polypeptide
KVNVNAIKKGGKAIGKGFKVISAASTAHDVYEHIKNRRH

SEQ ID NO: 160 - protein, 43 aa, Artificial Sequence
  Synthetic polypeptide
GKIPVKAIKKGGQIIGKALRGINIASTAHDIISQFKPKKKKNH

SEQ ID NO: 161 - protein, 38 aa, Artificial Sequence
  Synthetic polypeptide
KVPIGAIKKGGKIIKKGLGVIGAAGTAHEVYSHVKNRH

SEQ ID NO: 162 - protein, 38 aa, Artificial Sequence
  Synthetic polypeptide
KVPIGAIKKGGKIIKKGLGVLGAAGTAHEVYNHVRNRQ

SEQ ID NO: 163 - protein, 38 aa, Artificial Sequence
  Synthetic polypeptide
KVPIGAIKKGGKIIKKGLGVIGAAGTAHEVYSHVKNRQ

SEQ ID NO: 164 - protein, 38 aa, Artificial Sequence
  Synthetic polypeptide
KVPVGAIKKGGKAIKTGLGVVGAAGTAHEVYSHIRNRH

SEQ ID NO: 165 - protein, 38 aa, Artificial Sequence
  Synthetic polypeptide
KGIGSALKKGGKIIKGGLGALGAIGTGQQVYEHVQNRQ

SEQ ID NO: 166 - protein, 25 aa, Artificial Sequence
  Synthetic polypeptide
GWASKIGQTLGKIAKVGLKELIQPK

SEQ ID NO: 167 - skipped

SEQ ID NO: 168 - protein, 20 aa, Artificial Sequence
  Synthetic polypeptide
FLSLIPHAINAVSAIAKHFG

SEQ ID NO: 169 - protein, 23 aa, Artificial Sequence
  Synthetic polypeptide
VIGSILGALASGLPTLISWIKNR

SEQ ID NO: 170 - protein, 23 aa, Artificial Sequence
  Synthetic polypeptide
AIGSILGALAKGLPTLISWIKNR

SEQ ID NO: 171 - protein, 35 aa, Artificial Sequence
  Synthetic polypeptide
YYGNGVYCTKNKCTVDWAKATTCIAGMSIGGFLGG

SEQ ID NO: 172 - protein, 36 aa, Artificial Sequence
  Synthetic polypeptide
NFVTCRINRGFCVPIRCPGHRRQIGTCLGPRIKCCR

SEQ ID NO: 173 - protein, 26 aa, Artificial Sequence
  Synthetic polypeptide
SIITMTKEAKLPQLWKQIACRLYNTC

SEQ ID NO: 174 - protein, 60 aa, Artificial Sequence
  Synthetic polypeptide
ETESTPDYLKNIQQQLEEYTKNFNTQVQNAFDSDKIKSEVNNFIESLGKILNTEKKEAPK

SEQ ID NO: 175 - protein, 39 aa, Artificial Sequence
  Synthetic polypeptide
ENFFKEIERAGQRIRDAIISAAPAVETLAQAQKIIKGGD

SEQ ID NO: 176 - protein, 44 aa, Artificial Sequence
  Synthetic polypeptide
DTLIGSCVWGATNYTSDCNAECKRRGYKGGHCGSFLNVNCWCEE

SEQ ID NO: 177 - protein, 44 aa, Artificial Sequence
  Synthetic polypeptide
DKLIGSCVWGATNYTSDCNAECKRRGYKGGHCGSFWNVNCWCEE

SEQ ID NO: 178 - protein, 42 aa, Artificial Sequence
  Synthetic polypeptide
EADEPLWLYKGDNIERAPTTADHPILPSIIDDVKLDPNRRYA

SEQ ID NO: 179 - protein, 37 aa, Artificial Sequence
  Synthetic polypeptide
DIQIPGIKKPTHRDIIIPNWNPNVRTQPWQRFGGNKS

SEQ ID NO: 180 - protein, 42 aa, Artificial Sequence
  Synthetic polypeptide
EIRLPEPFRFPSPTVPKPIDIDPILPHPWSPRQTYPIIARRS

SEQ ID NO: 181 - protein, 23 aa, Artificial Sequence
  Synthetic polypeptide
GLLRASSVWGRKYYVDLAGCAKA

SEQ ID NO: 182 - protein, 26 aa, Artificial Sequence
  Synthetic polypeptide
SIITMTKEAKLPQSWKQIACRLYNTC

SEQ ID NO: 183 - protein, 37 aa, Artificial Sequence
  Synthetic polypeptide
AALRGALRAVARVGKAILPHVAIANPYVRTPYVHNNP

SEQ ID NO: 184 - protein, 13 aa, Artificial Sequence
  Synthetic polypeptide
VRRFPWWWPFLRR

SEQ ID NO: 185 - protein, 15 aa, Artificial Sequence
  Synthetic polypeptide
RRRFPWVCWPFLRRR

SEQ ID NO: 186 - protein, 10 aa, Artificial Sequence
  Synthetic polypeptide
RFPWWWPFLR

SEQ ID NO: 187 - protein, 7 aa, Artificial Sequence
  Synthetic polypeptide
FPWWWPF

SEQ ID NO: 188 - protein, 20 aa, Artificial Sequence
  Synthetic polypeptide
KWKLFKKIGIGKFLHSAKKF

SEQ ID NO: 189 - protein, 18 aa, Artificial Sequence
  Synthetic polypeptide
KWKLFKKIPKFLHSAKKF

SEQ ID NO: 190 - protein, 20 aa, Artificial Sequence
  Synthetic polypeptide
KLKLFKKIGIGKFLHSAKKF

SEQ ID NO: 191 - protein, 20 aa, Artificial Sequence
  Synthetic polypeptide
KAKLFKKIGIGKFLHSAKKF

SEQ ID NO: 192 - protein, 15 aa, Artificial Sequence
  Synthetic polypeptide
INLKAIAALAKKLLG

SEQ ID NO: 193 - protein, 14 aa, Artificial Sequence
  Synthetic polypeptide
INLKAIAAMAKKLL

SEQ ID NO: 194 - protein, 53 aa, Artificial Sequence
  Synthetic polypeptide
APIIRRIPYYPEVESDLRIVDCKRSEGFCQEYCNYLETQVGYCSKKKDACCLH

SEQ ID NO: 195 - skipped

SEQ ID NO: 196 - protein, 25 aa, Artificial Sequence
  Synthetic polypeptide
RSVCRQIKICRRRGGCYYKCTNRPY

SEQ ID NO: 197 - protein, 18 aa, Artificial Sequence
  Synthetic polypeptide
  misc_feature (1)..(1): Xaa can be any naturally occurring amino acid
XNLRRIIRKIIHIIKKYG

SEQ ID NO: 198 - protein, 18 aa, Artificial Sequence
  Synthetic polypeptide
  misc_feature (1)..(1): Xaa can be any naturally occurring amino acid
XNLRRIIRKGIHIIKKYG

SEQ ID NO: 199 - protein, 18 aa, Artificial Sequence
  Synthetic polypeptide
  misc_feature (1)..(1): Xaa can be any naturally occurring amino acid
XNLRRITRKIIHIIKKYG

SEQ ID NO: 200 - protein, 14 aa, Artificial Sequence
  Synthetic polypeptide
FIGPIISALASLFG

SEQ ID NO: 201 - protein, 20 aa, Artificial Sequence
  Synthetic polypeptide
FLSLALAALPKFLCLVFKKC

SEQ ID NO: 202 - protein, 20 aa, Artificial Sequence
  Synthetic polypeptide
FLSLALAALPKLFCLIFKKC

SEQ ID NO: 203 - protein, 20 aa, Artificial Sequence
  Synthetic polypeptide
FLPLLLAGLPKLLCLFFKKC

SEQ ID NO: 204 - protein, 33 aa, Artificial Sequence
  Synthetic polypeptide
GLFDVVKGVLKGAGKNVAGSLLEQLKCKLSGGC

SEQ ID NO: 205 - protein, 33 aa, Artificial Sequence
  Synthetic polypeptide
GIFDVVKGVLKGVGKNVAGSLLEQLKCKLSGGC

SEQ ID NO: 206 - protein, 37 aa, Artificial Sequence
  Synthetic polypeptide
GLFSVVTGVLKAVGKNVAKNVGGSLLEQLKCKISGGC

SEQ ID NO: 207 - protein, 34 aa, Artificial Sequence
  Synthetic polypeptide
YVPLPNVPQPGRRPFPTFPGQGPFNPKIKWPQGY

SEQ ID NO: 208 - protein, 37 aa, Artificial Sequence
  Synthetic polypeptide
QCIGNGGRCNENVGPPYCCSGFCLRQPGQGYGYCKNR

SEQ ID NO: 209 - protein, 36 aa, Artificial Sequence
  Synthetic polypeptide
CIGNGGRCNENVGPPYCCSGFCLRQPNQGYGVCRNR

SEQ ID NO: 210 - protein, 30 aa, Artificial Sequence
  Synthetic polypeptide
VGECVRGRCPSGMCCSQFGYCGKGPKYCGR

SEQ ID NO: 211 - protein, 23 aa, Artificial Sequence
  Synthetic polypeptide
FALALKALKKALKKLKKALKKAL

SEQ ID NO: 212 - protein, 35 aa, Artificial Sequence
  Synthetic polypeptide
LRDLVCYCRTRGCKRRERMNGTCRKGHLMYTLCCR

SEQ ID NO: 213 - protein, 35 aa, Artificial Sequence
  Synthetic polypeptide
LRDLVCYCRKRGCKRRERMNGTCRKGHLMYTLCCR

SEQ ID NO: 214 - protein, 51 aa, Artificial Sequence
  Synthetic polypeptide
VTCDLLSFKGQVNDSACAANCLSLGKAGGHCEKVGCICRKTSFKDLWDKYF

SEQ ID NO: 215 - protein, 31 aa, Artificial Sequence
  Synthetic polypeptide
AMWKDVLKKIGTVALHAGKAALGAVADTISQ

SEQ ID NO: 216 - protein, 37 aa, Artificial Sequence
  Synthetic polypeptide
LLGDFFRKSKEKIGKEFKRIVQRIKDFLRNLVPRTES

SEQ ID NO: 217 - protein, 27 aa, Artificial Sequence
  Synthetic polypeptide
GRFKRFRKKFKKLFKKLSPVIPLLHLG

SEQ ID NO: 218 - protein, 23 aa, Artificial Sequence
  Synthetic polypeptide
RIIDLLWRVRRPQKPKFVTVWVR

SEQ ID NO: 219 - protein, 36 aa, Artificial Sequence
  Synthetic polypeptide
GRFRRLRKKTRKRLKKIGKVLKWIPPIVGSIPLGCG

SEQ ID NO: 220 - protein, 37 aa, Artificial Sequence
  Synthetic polypeptide
GLLSRLRDFLSDRGRRLGEKIERIGQKIKDLSEFFQS

SEQ ID NO: 221 - protein, 39 aa, Artificial Sequence
  Synthetic polypeptide
RRRPRPPYLPRPRPPPFFPPRLPPRIPPGFPPRFPPRFP

SEQ ID NO: 222 - protein, 32 aa, Artificial Sequence
  Synthetic polypeptide
DLRFLYPRGKLPVPTPPPFNPKPIYIDMGNRY

SEQ ID NO: 223 - protein, 29 aa, Artificial Sequence
  Synthetic polypeptide
VCGETCVGGTCNTPGCTCSWPVCTRNGLP

SEQ ID NO: 224 - protein, 30 aa, Artificial Sequence
  Synthetic polypeptide
GIPCGESCVWIPCISAALGCSCKNKVCYRN

SEQ ID NO: 225 - protein, 31 aa, Artificial Sequence
  Synthetic polypeptide
SIPCGESCVFIPCTVTALLGCSCKSKVCYKN

SEQ ID NO: 226 - protein, 31 aa, Artificial Sequence
  Synthetic polypeptide
GVIPCGESCVFIPCISTLLGCSCKNKVCYRN

SEQ ID NO: 227 - protein, 23 aa, Artificial Sequence
  Synthetic polypeptide
FFHHIFRGIVHVGKTIHKLVTGG

SEQ ID NO: 228 - protein, 23 aa, Artificial Sequence
  Synthetic polypeptide
FFHHIFRGIVHVGKTIHRLVTGG

SEQ ID NO: 229 - protein, 23 aa, Artificial Sequence
  Synthetic polypeptide
FFHHIFRGIVHVGRTIHKLVTGG

SEQ ID NO: 230 - protein, 23 aa, Artificial Sequence
  Synthetic polypeptide
FFHHIFRGIVHVGRTIHRLVTGG

SEQ ID NO: 231 - skipped

SEQ ID NO: 232 - protein, 30 aa, Artificial Sequence
  Synthetic polypeptide
GWKDWAKKAGGWLKKKGPGMAKAALKAAMQ

SEQ ID NO: 233 - protein, 30 aa, Artificial Sequence
  Synthetic polypeptide
GWKDWLKKGKEWLKAKGPGIVKAALQAATQ

SEQ ID NO: 234 - protein, 30 aa, Artificial Sequence
  Synthetic polypeptide
GWKDWLNKGKEWLKKKGPGIMKAALKAATQ

SEQ ID NO: 235 - protein, 29 aa, Artificial Sequence
  Synthetic polypeptide
DFKDWMKTAGEWLKKKGPGILKAAMAAAT

SEQ ID NO: 236 - protein, 30 aa, Artificial Sequence
  Synthetic polypeptide
GLKDWVKIAGGWLKKKGPGILKAAMAAATQ

SEQ ID NO: 237 - protein, 18 aa, Artificial Sequence
  Synthetic polypeptide
GLVDVLGKVGGLIKKLLP

SEQ ID NO: 238 - protein, 19 aa, Artificial Sequence
  Synthetic polypeptide
GLVDVLGKVGGLIKKLLPG

SEQ ID NO: 239 - protein, 24 aa, Artificial Sequence
  Synthetic polypeptide
LLKELWTKMKGAGKAVLGKIKGLL

SEQ ID NO: 240 - protein, 24 aa, Artificial Sequence
  Synthetic polypeptide
LLKELWTKIKGAGKAVLGKIKGLL

SEQ ID NO: 241 - protein, 25 aa, Artificial Sequence
  Synthetic polypeptide
WLGSALKIGAKLLPSVVGLFKKKKQ

SEQ ID NO: 242 - protein, 25 aa, Artificial Sequence
  Synthetic polypeptide
WLGSALKIGAKLLPSVVGLFQKKKK

SEQ ID NO: 243 - protein, 26 aa, Artificial Sequence
  Synthetic polypeptide
GIWGTLAKIGIKAVPRVISMLKKKKQ

SEQ ID NO: 244 - protein, 26 aa, Artificial Sequence
  Synthetic polypeptide
GIWGTALKWGVKLLPKLVGMAQTKKQ

SEQ ID NO: 245 - protein, 24 aa, Artificial Sequence
  Synthetic polypeptide
FWGALIKGAAKLIPSVVGLFKKKQ

SEQ ID NO: 246 - protein, 20 aa, Artificial Sequence
  Synthetic polypeptide
FIGTALGIASAIPAIVKLFK

SEQ ID NO: 247 - protein, 10 aa, Artificial Sequence
  Synthetic polypeptide
LLPNLLKSLL

SEQ ID NO: 248 - protein, 13 aa, Artificial Sequence
  Synthetic polypeptide
FVQWFSKFLGRIL

SEQ ID NO: 249 - protein, 13 aa, Artificial Sequence
  Synthetic polypeptide
GLFDIIKKIAESI

SEQ ID NO: 250 - protein, 13 aa, Artificial Sequence
  Synthetic polypeptide
GLFDIIKKIAESF

SEQ ID NO: 251 - protein, 14 aa, Artificial Sequence
  Synthetic polypeptide
FDIVKKVVGALGSL

SEQ ID NO: 252 - protein, 16 aa, Artificial Sequence
  Synthetic polypeptide
GLFDIVKKVVGAIGSL

SEQ ID NO: 253 - protein, 14 aa, Artificial Sequence
  Synthetic polypeptide
FDIVKKVVGTIAGL

SEQ ID NO: 254 - protein, 16 aa, Artificial Sequence
  Synthetic polypeptide
GLFDIAKKVIGVIGSL

SEQ ID NO: 255 - protein, 17 aa, Artificial Sequence
  Synthetic polypeptide
GLFDIVKKIAGHIVSSI

SEQ ID NO: 256 - protein, 21 aa, Artificial Sequence
  Synthetic polypeptide
GLFGVLAKVAAHVVPAIAEHF

SEQ ID NO: 257 - protein, 23 aa, Artificial Sequence
  Synthetic polypeptide
GLFGVLAKVASHVVPAIAEHFQA

SEQ ID NO: 258 - protein, 46 aa, Artificial Sequence
  Synthetic polypeptide
KTCEHLADTYRGVCFTNASCDDHCKNKAHLISGTCHNWKCFCTQNC

SEQ ID NO: 259 - protein, 47 aa, Artificial Sequence
  Synthetic polypeptide
KTCENLSGTFKGPCIPDGNCNKHCRNNEHLLSGRCRDDFRCWCTNRC

SEQ ID NO: 260 - protein, 47 aa, Artificial Sequence
  Synthetic polypeptide
SSLLEKGLDGAKKAVGGLGKLGKDAVEDLESVGKGAVHDVKDVLDSV

SEQ ID NO: 261 - protein, 18 aa, Artificial Sequence
  Synthetic polypeptide
ZCRRLCYKQRCVTYCRGR

SEQ ID NO: 262 - protein, 21 aa, Artificial Sequence
  Synthetic polypeptide
GCRFCCNCCPNMSGCGVCCRF

SEQ ID NO: 263 - protein, 15 aa, Artificial Sequence
  Synthetic polypeptide
SKGKKANKDVELARG

SEQ ID NO: 264 - protein, 24 aa, Artificial Sequence
  Synthetic polypeptide
GLNTLKKVFQGLHEAIKLINNHVQ

SEQ ID NO: 265 - protein, 24 aa, Artificial Sequence
  Synthetic polypeptide
GLNALKKVFQGIHEAIKLINNHVQ

SEQ ID NO: 266 - protein, 23 aa, Artificial Sequence
  Synthetic polypeptide
GINTLKKVIQGLHEVIKLVSNHE

SEQ ID NO: 267 - protein, 23 aa, Artificial Sequence
  Synthetic polypeptide
GINTLKKVIQGLHEVIKLVSNHA

SEQ ID NO: 268 - skipped

SEQ ID NO: 269 - protein, 48 aa, Artificial Sequence
  Synthetic polypeptide
FRGLAKLLKIGLKSFARVLKKVLPKAAKAGKALAKSMADENAIRQQNQ

SEQ ID NO: 270 - protein, 37 aa, Artificial Sequence
  Synthetic polypeptide
GKFSVFGKILRSIAKVFKGVGKVRKQFKTASDLDKNQ

SEQ ID NO: 271 - protein, 37 aa, Artificial Sequence
  Synthetic polypeptide
GKFSGFAKILKSIAKFFKGVGKVRKQFKEASDLDKNQ

SEQ ID NO: 272 - protein, 37 aa, Artificial Sequence
  Synthetic polypeptide
GKLSGISKVLRAIAKFFKGVGKARKQFKEASDLDKNQ

SEQ ID NO: 273 - protein, 37 aa, Artificial Sequence
  Synthetic polypeptide
GKFSVFSKILRSIAKVFKGVGKVRKQFKTASDLDKNQ

SEQ ID NO: 274 - protein, 35 aa, Artificial Sequence
  Synthetic polypeptide
RWKLFKKIEKVGRNVRDGLIKAGPAIAVIGQAKSL

SEQ ID NO: 275 - protein, 35 aa, Artificial Sequence
  Synthetic polypeptide
RWKIFKKIEKMGRNIRDGIVKAGPAIEVLGSAKAI

SEQ ID NO: 276 - protein, 24 aa, Artificial Sequence
  Synthetic polypeptide
GVLSNVIGYLKKLGTGALNAVLKQ

SEQ ID NO: 277 - protein, 13 aa, Artificial Sequence
  Synthetic polypeptide
ILPWKWPWWPWRR

SEQ ID NO: 278 - protein, 33 aa, Artificial Sequence
  Synthetic polypeptide
SHQDCYEALHKCMASHSKPFSCSMKFHMCLQQQ

SEQ ID NO: 279 - protein, 27 aa, Artificial Sequence
  Synthetic polypeptide
GIGTKILGGVKTALKGALKELASTYAN

SEQ ID NO: 280 - protein, 20 aa, Artificial Sequence
  Synthetic polypeptide
ILGPVISTIGGVLGGLLKNL

SEQ ID NO: 281 - protein, 27 aa, Artificial Sequence
  Synthetic polypeptide
GIGTKILGGVKTALKGALKELASTYVN

SEQ ID NO: 282 - protein, 27 aa, Artificial Sequence
  Synthetic polypeptide
GIGGKILSGLKTALKGAAKELASTYLH

SEQ ID NO: 283 - protein, 20 aa, Artificial Sequence
  Synthetic polypeptide
ILGPVLSMVGSALGGLIKKI

SEQ ID NO: 284 - protein, 27 aa, Artificial Sequence
  Synthetic polypeptide
GIGGVLLSAGKAALKGLAKVLAEKYAN

SEQ ID NO: 285 - protein, 20 aa, Artificial Sequence
  Synthetic polypeptide
ILGPVLGLVGNALGGLIKKI

SEQ ID NO: 286 - protein, 27 aa, Artificial Sequence
  Synthetic polypeptide
SIGAKILGGVKTFFKGALKELASTYLQ

SEQ ID NO: 287 - protein, 33 aa, Artificial Sequence
  Synthetic polypeptide
GLLNTFKDWAISIAKGAGKGVLTTLSCKLDKSC

SEQ ID NO: 288 - protein, 33 aa, Artificial Sequence
  Synthetic polypeptide
SLFSLIKAGAKFLGKNLLKQGAQYAACKVSKEC

SEQ ID NO: 289 - protein, 37 aa, Artificial Sequence
  Synthetic polypeptide
GILDSFKQFAKGVGKDLIKGAAQGVLSTMSCKLAKTC

SEQ ID NO: 290 - protein, 13 aa, Artificial Sequence
  Synthetic polypeptide
LLPIVGNLLKSLL

SEQ ID NO: 291 - protein, 43 aa, Artificial Sequence
  Synthetic polypeptide
VTCDILSVEAKGVKLNDAACAAHCLFRGRSGGYCNGKRVCVCR

SEQ ID NO: 292 - protein, 32 aa, Artificial Sequence
  Synthetic polypeptide
SLGGVISGAKKVAKVAIPIGKAVLPVVAKLVG

SEQ ID NO: 293 - protein, 26 aa, Artificial Sequence
  Synthetic polypeptide
HRHQGPIFDTRPSPFNPNQPRPGPIY

SEQ ID NO: 294 - protein, 21 aa, Artificial Sequence
  Synthetic polypeptide
GSKKPVPIIYCNRRTGKCQRM

SEQ ID NO: 295 - protein, 32 aa, Artificial Sequence
  Synthetic polypeptide
VTCYCRSTRCGFRERLSGACGYRGRIYRLCCR

SEQ ID NO: 296 - protein, 18 aa, Artificial Sequence
  Synthetic polypeptide
GICRCICGRRICRCICGR

SEQ ID NO: 297 - protein, 18 aa, Artificial Sequence
  Synthetic polypeptide
RYICRCICGRGICRCICG

SEQ ID NO: 298 - protein, 18 aa, Artificial Sequence
  Synthetic polypeptide
GICRCICGRYICRCICGR

SEQ ID NO: 299 - protein, 18 aa, Artificial Sequence
  Synthetic polypeptide
GICYCICGKGICRCICGR

SEQ ID NO: 300 - protein, 9 aa, Artificial Sequence
  Synthetic polypeptide
  misc_feature (2)..(2): Xaa can be any naturally occurring amino acid
  misc_feature (6)..(7): Xaa can be any naturally occurring amino acid
RXICGXXIC

SEQ ID NO: 301 - protein, 18 aa, Artificial Sequence
  Synthetic polypeptide
GVCRCICGRGVCRCICGR

SEQ ID NO: 302 - protein, 18 aa, Artificial Sequence
  Synthetic polypeptide
GVCRCICGRGVCRCICRR

SEQ ID NO: 303 - protein, 18 aa, Artificial Sequence
  Synthetic polypeptide
GICRCICGRRICRCICGK

SEQ ID NO: 304 - protein, 18 aa, Artificial Sequence
  Synthetic polypeptide
GICKCICGRRICRCICGR

SEQ ID NO: 305 - protein, 18 aa, Artificial Sequence
  Synthetic polypeptide
GICRCICGRRICKCICGR

SEQ ID NO: 306 - protein, 18 aa, Artificial Sequence
  Synthetic polypeptide
GICRCICGRKICRCICGR

SEQ ID NO: 307 - protein, 18 aa, Artificial Sequence
  Synthetic polypeptide
GICRCICGKKICRCICGR

SEQ ID NO: 308 - protein, 18 aa, Artificial Sequence
  Synthetic polypeptide
GICRCICGKRICRCICGR

SEQ ID NO: 309 - protein, 18 aa, Artificial Sequence
  Synthetic polypeptide
GICKCICGKGICKCICGR

SEQ ID NO: 310 - protein, 18 aa, Artificial Sequence
  Synthetic polypeptide
GICRCICGKGICRCYCGR

SEQ ID NO: 311 - protein, 141 aa, Artificial Sequence
  Synthetic polypeptide
VTPAMRTFALLTAMLLLVALAQAEPLQARADEAAAQEQPGADDQEMAHAFTWHESAALPLSSDSARGLRCICGRGICRLLRRFGSCAFRGTLHRICCRACRIKKHKLRIYFESKKFLLLLYLVLHFLFSSKINTLLQDFSL

SEQ ID NO: 312 - protein, 140 aa, Artificial Sequence
  Synthetic polypeptide
VTPAMRTFALLTAMLLLVALAQAEPLQARADEAAAQEQPGADDQEMAHAFTWHESAALPLSSDSARGLRCICGRRICRLLRRFGSCAFRGTLHRICCRACRIKKHKLRIYFESKKFLLLLYLVLHFLFSSKINTLLQDFS

SEQ ID NO: 313 - protein, 118 aa, Artificial Sequence
  Synthetic polypeptide
VTPAMRTFALLTAMLLLVALAQAEPLQARADEAAAQEQSDSARGLRCICGRGICRLLRRFGSCAFRGTLHRVCCRTCRIKKNKLRIYFESKKFLLLLYLVLHFLFSSKINTLLQDFSL

SEQ ID NO: 314 - protein, 9 aa, Artificial Sequence
  Synthetic polypeptide
RCLCVLRIC

SEQ ID NO: 315 - protein, 9 aa, Artificial Sequence
  Synthetic polypeptide
RCLCVLRVC

SEQ ID NO: 316 - protein, 9 aa, Artificial Sequence
  Synthetic polypeptide
RCLCTLRIC

SEQ ID NO: 317 - protein, 9 aa, Artificial Sequence
  Synthetic polypeptide
RCLCTLRVC

SEQ ID NO: 318 - protein, 9 aa, Artificial Sequence
  Synthetic polypeptide
RCLCGLRIC

SEQ ID NO: 319 - protein, 9 aa, Artificial Sequence
  Synthetic polypeptide
RCLCGLRVC

SEQ ID NO: 320 - protein, 9 aa, Artificial Sequence
  Synthetic polypeptide
RCICVLRFC

SEQ ID NO: 321 - protein, 9 aa, Artificial Sequence
  Synthetic polypeptide
RCICVLRVC

SEQ ID NO: 322 - protein, 9 aa, Artificial Sequence
  Synthetic polypeptide
RCICTLRFC

SEQ ID NO: 323 - protein, 9 aa, Artificial Sequence
  Synthetic polypeptide
RCICTLRVC

SEQ ID NO: 324 - protein, 9 aa, Artificial Sequence
  Synthetic polypeptide
RCICRLRFC

SEQ ID NO: 325 - protein, 9 aa, Artificial Sequence
  Synthetic polypeptide
RCICRLRVC

SEQ ID NO: 326 - protein, 9 aa, Artificial Sequence
  Synthetic polypeptide
RCICGRRIC

SEQ ID NO: 327 - protein, 9 aa, Artificial Sequence
  Synthetic polypeptide
RCLCVRRVC

SEQ ID NO: 328 - protein, 9 aa, Artificial Sequence
  Synthetic polypeptide
RCLCTRRFC

SEQ ID NO: 329 - protein, 9 aa, Artificial Sequence
  Synthetic polypeptide
RCLCGRRVC

SEQ ID NO: 330 - protein, 9 aa, Artificial Sequence
  Synthetic polypeptide
RCLCRRRFC

SEQ ID NO: 331 - protein, 9 aa, Artificial Sequence
  Synthetic polypeptide
RCLCRRRVC

SEQ ID NO: 332 - protein, 9 aa, Artificial Sequence
  Synthetic polypeptide
RCLCRLRIC

SEQ ID NO: 333 - protein, 9 aa, Artificial Sequence
  Synthetic polypeptide
RCICGLRVC

SEQ ID NO: 334 - protein, 9 aa, Artificial Sequence
  Synthetic polypeptide
RCICGLRFC

SEQ ID NO: 335 - protein, 9 aa, Artificial Sequence
  Synthetic polypeptide
RCICGRRFC

SEQ ID NO: 336 - protein, 9 aa, Artificial Sequence
  Synthetic polypeptide
RCICVRRVC

SEQ ID NO: 337 - protein, 9 aa, Artificial Sequence
  Synthetic polypeptide
RCICRLRIC

SEQ ID NO: 338 - protein, 9 aa, Artificial Sequence
  Synthetic polypeptide
RCICTLRIC

SEQ ID NO: 339 - protein, 9 aa, Artificial Sequence
  Synthetic polypeptide
RCICTRRFC

SEQ ID NO: 340 - protein, 9 aa, Artificial Sequence
  Synthetic polypeptide
RCICTRRVC

SEQ ID NO: 341 - protein, 9 aa, Artificial Sequence
  Synthetic polypeptide
RCICRRRFC

SEQ ID NO: 342 - protein, 9 aa, Artificial Sequence
  Synthetic polypeptide
RCICRRRVC

SEQ ID NO: 343 - protein, 9 aa, Artificial Sequence
  Synthetic polypeptide
RCLCGRRFC

SEQ ID NO: 344 - protein, 9 aa, Artificial Sequence
  Synthetic polypeptide
RCLCVRRIC

SEQ ID NO: 345 - protein, 9 aa, Artificial Sequence
  Synthetic polypeptide
RCLCTRRIC

SEQ ID NO: 346 - protein, 9 aa, Artificial Sequence
  Synthetic polypeptide
RCICGRRVC

SEQ ID NO: 347 - protein, 9 aa, Artificial Sequence
  Synthetic polypeptide
RCICGLRIC

SEQ ID NO: 348 - protein, 9 aa, Artificial Sequence
  Synthetic polypeptide
RCICVRRIC

SEQ ID NO: 349 - protein, 9 aa, Artificial Sequence
  Synthetic polypeptide
RCICTRRIC

SEQ ID NO: 350 - protein, 9 aa, Artificial Sequence
  Synthetic polypeptide
RCICRRRIC

SEQ ID NO: 351 - protein, 9 aa, Artificial Sequence
  Synthetic polypeptide
RCLCGRRIC

SEQ ID NO: 352 - protein, 141 aa, Artificial Sequence
  Synthetic polypeptide
  misc_feature (113)..(113): Xaa can be any naturally occurring amino acid
VTPAMRTFALLTAMLLLVALHAQAEARQARADEAAAQQQPGADDQGMAHSFTRPENAALPLSESARGLRCICRRGVCQLLRRLGSCAFRGLCRICCRASRIKKNTLRSYFESXKKFLLLLYLVLNFLFSSQINTFSQDFCL

SEQ ID NO: 353 - protein, 141 aa, Artificial Sequence
  Synthetic polypeptide
  misc_feature (113)..(113): Xaa can be any naturally occurring amino acid
VTPAMRTFALLTAMLLLVALHAQAEARQARADEAAAQQQPGADDQGMAHSFTRPENAALPLSESARGLRCLCRRGVCQLLRRLGSCAFRGLCRICCRASRIKKNTLRSYFESXKKFLLLLYLVLNFLFSSQINTFSQDFCL

SEQ ID NO: 354 - protein, 141 aa, Artificial Sequence
  Synthetic polypeptide
VTPAMRTFALLTAMLLLVALAQAEPLQARADEAAAQEQPGADDQEMAHAFTWDESAALPLSDSARGLRCIGGRGICGLLQRRVGSCAFRGTLHRICCRACRIKKNKLRIYSESKKFLLLLYLVLHFLFSSKINTSLQDFSL

SEQ ID NO: 355 - protein, 141 aa, Artificial Sequence
  Synthetic polypeptide
VTPAMRTFALLTAMLLLVALAQAEPLQARADEAAAQEQPGADDQEMAHAFTWDESAALPLSDSARGLRCIGGRGICGLLQRRFGSCAFRGTLHRICCRACRIKKNKLRIYSESKKFLLLLYLVLHFLFSSKINTLLQDFSL

SEQ ID NO: 356 - protein, 140 aa, Artificial Sequence
  Synthetic polypeptide
VTPAMRTFALLTAMLLLVDLAQAEPLQARADEAAAQEQPGADDQEMAHAFTWDESAALPLSDSARGLRCICGRGICRLLRRFGSCAFRGTLHRICCRACRIKKNKLRIYFETKKFLLLLYLVLHFLFSSKINTLLQDFCL

SEQ ID NO: 357 - protein, 141 aa, Artificial Sequence
  Synthetic polypeptide
VTPAMRTFTVLAAMLLVVALQAQAEPLRARADETAAQEQPGADDQEMAHAFTWDESAALPLSDSARGLRCICRRGVCRLLRHFGSCAFRGTLHRICCRACRIKKNKLRIYFESKKFLFLLYLALHFLFSSKINTLLQDFCL

SEQ ID NO: 358 - protein, 141 aa, Artificial Sequence
  Synthetic polypeptide
VTPAMRTFTVLAAMLLVVALQAQAEPLRARADETAAQEQPGADDQEMAHAFTWDESAALPLSDSARGLRCICRRGVCRFLRHLGSCAFRGTLHRICCRACRIKKNKLRIYFESKKFVFLLYLALHFLFSSKINTLLQDFCL

SEQ ID NO: 359 - protein, 140 aa, Artificial Sequence
  Synthetic polypeptide
VTPAMRTFALLAAMLLLVALAEAEPLQARADETAAQEQPGADDQEMAHAFTWDESATLPLSDSARGLRCICRRGVCRFLRHLGSCAFRGTLHRICCRACRIKKNKLRIYFESKKFVFLLYLALHFLFSSKINTLLQDFCL

SEQ ID NO: 360 - protein, 140 aa, Artificial Sequence
  Synthetic polypeptide
VTPAMRTFALLTAMLLLVALAQAEPLQARADEAAAQEQPGADDQEMAHAFTWHESAALPLSDSARGLRCICGRGICRLLRRFGSCAFRGTLHRICCRACRIKKHKLRIYFESKKFLLLLYLVLHFLFSSKINTLLQDFSL

SEQ ID NO: 361 - protein, 9 aa, Artificial Sequence
  Synthetic polypeptide
RCLCVLGIC

SEQ ID NO: 362 - protein, 9 aa, Artificial Sequence
  Synthetic polypeptide
RCLCVLGVC

SEQ ID NO: 363 - protein, 9 aa, Artificial Sequence
  Synthetic polypeptide
RCLCTLGIC

SEQ ID NO: 364 - protein, 9 aa, Artificial Sequence
  Synthetic polypeptide
RCLCTLGVC

SEQ ID NO: 365 - protein, 9 aa, Artificial Sequence
  Synthetic polypeptide
RCLCGLGIC

SEQ ID NO: 366 - protein, 9 aa, Artificial Sequence
  Synthetic polypeptide
RCLCGLGVC

SEQ ID NO: 367 - protein, 9 aa, Artificial Sequence
  Synthetic polypeptide
RCICVLGFC

SEQ ID NO: 368 - protein, 9 aa, Artificial Sequence
  Synthetic polypeptide
RCICVLGVC

SEQ ID NO: 369 - protein, 9 aa, Artificial Sequence
  Synthetic polypeptide
RCICTLGFC

SEQ ID NO: 370 - protein, 9 aa, Artificial Sequence
  Synthetic polypeptide
RCICTLGVC

SEQ ID NO: 371 - protein, 9 aa, Artificial Sequence
  Synthetic polypeptide
RCICRLGFC

SEQ ID NO: 372 - protein, 9 aa, Artificial Sequence
  Synthetic polypeptide
RCICRLGVC

SEQ ID NO: 373 - protein, 9 aa, Artificial Sequence
  Synthetic polypeptide
RCICGRGIC

SEQ ID NO: 374 - protein, 9 aa, Artificial Sequence
  Synthetic polypeptide
RCLCVRGVC

SEQ ID NO: 375 - protein, 9 aa, Artificial Sequence
  Synthetic polypeptide
RCLCTRGFC

SEQ ID NO: 376 - protein, 9 aa, Artificial Sequence
  Synthetic polypeptide
RCLCTRGVC

SEQ ID NO: 377 - protein, 9 aa, Artificial Sequence
  Synthetic polypeptide
RCLCRRGFC

SEQ ID NO: 378 - protein, 9 aa, Artificial Sequence
  Synthetic polypeptide
RCLCRRGVC

SEQ ID NO: 379 - protein, 9 aa, Artificial Sequence
  Synthetic polypeptide
RCLCRLGIC

SEQ ID NO: 380 - protein, 9 aa, Artificial Sequence
  Synthetic polypeptide
RCICGLGVC

SEQ ID NO: 381 - protein, 9 aa, Artificial Sequence
  Synthetic polypeptide
RCICGLGFC

SEQ ID NO: 382 - protein, 9 aa, Artificial Sequence
  Synthetic polypeptide
RCICGRGFC

SEQ ID NO: 383 - protein, 9 aa, Artificial Sequence
  Synthetic polypeptide
RCICVRGVC

SEQ ID NO: 384 - protein, 9 aa, Artificial Sequence
  Synthetic polypeptide
RCICRLGIC

SEQ ID NO: 385 - protein, 9 aa, Artificial Sequence
  Synthetic polypeptide
RCICTLGIC

SEQ ID NO: 386 - protein, 9 aa, Artificial Sequence
  Synthetic polypeptide
RCICTRGFC

SEQ ID NO: 387 - protein, 9 aa, Artificial Sequence
  Synthetic polypeptide
RCICTRGVC

SEQ ID NO: 388 - protein, 9 aa, Artificial Sequence
  Synthetic polypeptide
RCICRRGFC

SEQ ID NO: 389 - protein, 9 aa, Artificial Sequence
  Synthetic polypeptide
RCICRRGVC

SEQ ID NO: 390 - protein, 9 aa, Artificial Sequence
  Synthetic polypeptide
RCLCGRGFC

SEQ ID NO: 391 - protein, 9 aa, Artificial Sequence
  Synthetic polypeptide
RCLCGRGVC

SEQ ID NO: 392 - protein, 9 aa, Artificial Sequence
  Synthetic polypeptide
RCLCVRGIC

SEQ ID NO: 393 - protein, 9 aa, Artificial Sequence
  Synthetic polypeptide
RCLCTRGIC

SEQ ID NO: 394 - protein, 9 aa, Artificial Sequence
  Synthetic polypeptide
RCICGRGVC

SEQ ID NO: 395 - protein, 9 aa, Artificial Sequence
  Synthetic polypeptide
RCICGLGIC

SEQ ID NO: 396 - protein, 9 aa, Artificial Sequence
  Synthetic polypeptide
RCICVRGIC

SEQ ID NO: 397 - protein, 9 aa, Artificial Sequence
  Synthetic polypeptide
RCICTRGIC

SEQ ID NO: 398 - protein, 9 aa, Artificial Sequence
  Synthetic polypeptide
RCICRRGIC

SEQ ID NO: 399 - protein, 9 aa, Artificial Sequence
  Synthetic polypeptide
RCLCGRGIC

SEQ ID NO: 400 - protein, 76 aa, Artificial Sequence
  Synthetic polypeptide
MRTFALLTAMLLLVALHAQAEARQARADEAAAQQQPGADDQGMAHSFTRPENAALPLSESARGLRCLCRRGVCQLL

SEQ ID NO: 401 - protein, 76 aa, Artificial Sequence
  Synthetic polypeptide
MRTFALLTAMLLLVALHAQAEARQARADEAAAQQQPGTDDQGMAHSFTWPENAALPLSESAKGLRCICTRGFCRLL

SEQ ID NO: 402 - protein, 97 aa, Artificial Sequence
  Synthetic polypeptide
MRIIALLAAILLVALQVRAGPLQARGDEAPGQEQRGPEDQDISISFAWDKSSALQVSGSTRGMVCSCRLVFCRRTELRVGNCLIGGVSFTYCCTRVD

SEQ ID NO: 403 - protein, 59 aa, Artificial Sequence
  Synthetic polypeptide
AQAEPLQARADEAAAQEQPGADDQEMAHAFTWHESAALPLSDSARGLRCICGRGICRLL

SEQ ID NO: 404 - protein, 18 aa, Artificial Sequence
  Synthetic polypeptide
RGCICRCIGRGCICRCIG

SEQ ID NO: 405 - protein, 18 aa, Artificial Sequence
  Synthetic polypeptide
GICICICGRGICYCICGR

SEQ ID NO: 406 - protein, 18 aa, Artificial Sequence
  Synthetic polypeptide
GICICICGYGICRCICGR

SEQ ID NO: 407 - protein, 18 aa, Artificial Sequence
  Synthetic polypeptide
GICYCICGRGICRCICGR

SEQ ID NO: 408 - protein, 18 aa, Artificial Sequence
  Synthetic polypeptide
GICRCICGRGYCRCICGR

SEQ ID NO: 409 - protein, 18 aa, Artificial Sequence
  Synthetic polypeptide
GYCRCICGRGICRCICGR

SEQ ID NO: 410 - protein, 18 aa, Artificial Sequence
  Synthetic polypeptide
GICRCICGRGICRCYCGR

SEQ ID NO: 411 - protein, 18 aa, Artificial Sequence
  Synthetic polypeptide
GICRCYCGRGICRCICGR

SEQ ID NO: 412 - protein, 18 aa, Artificial Sequence
  Synthetic polypeptide
GICRCICGKGICRCICGR

SEQ ID NO: 413 - protein, 18 aa, Artificial Sequence
  Synthetic polypeptide
GICRCICGRGICRCICGR

SEQ ID NO: 414 - protein, 8 aa, Artificial Sequence
  Synthetic polypeptide
VPKCCKPV

SEQ ID NO: 415 - protein, 4 aa, Artificial Sequence
  Synthetic polypeptide
CKPV

SEQ ID NO: 416 - protein, 13 aa, Artificial Sequence
  Synthetic polypeptide
SYSMEHFRWGKPV

SEQ ID NO: 417 - protein, 8 aa, Artificial Sequence
  Synthetic polypeptide
HFRWGKPV

SEQ ID NO: 418 - protein, 7 aa, Artificial Sequence
  Synthetic polypeptide
MEHFRWG

SEQ ID NO: 419 - protein, 106 aa, Artificial Sequence
  Synthetic polypeptide
MAKSYGAIFLLTLIVLFMLQTMYMASSGSNVKWRQKRVGPGSLKRTQCPSECDRRCKKTQYHKACITFCNKCCRKCLCVPPGYYGNKQVCSCYNNWKTQEGGPKCP

SEQ ID NO: 420 - protein, 59 aa, Artificial Sequence
  Synthetic polypeptide
CDGKCKVRCSKASRHDDCLKYCGVCCASCNCVPSGTAGNKDECPCYRDMTTGHGARKRP

SEQ ID NO: 421 - protein, 76 aa, Artificial Sequence
  Synthetic polypeptide
ADVENSQKKNGYAKKIDCGSACVARCRLSRRPRLCHRACGTCCYRCNCVPPGTYGNYDKCQCYASLTTHGGRRKCP

SEQ ID NO: 422 - protein, 54 aa, Artificial Sequence
  Synthetic polypeptide
MVRCSLSSRPNLCHRACGTCCARCNCVAPGTSGNYDKCPCYGSLTTHGGRRKEV

SEQ ID NO: 423 - protein, 70 aa, Artificial Sequence
  Synthetic polypeptide
QSKDGPALEKWCGQKCEGRCKEAGMKDRCLKYCGICCKDCQCVPSGTYGNKHECACYRDKLSSKGTPKCP

SEQ ID NO: 424 - protein, 75 aa, Artificial Sequence
  Synthetic polypeptide
EQKQGQYGEGSLRPSECGQRCSYRCSATSHKKPCMFFCQKCCAKCLCVPPGTFGNKQVCPCYNNWKTQQGGPKCP

SEQ ID NO: 425 - protein, 59 aa, Artificial Sequence
  Synthetic polypeptide
CGGKCNVRCSKAGQHEECLKYCNICCQKCNCVPSGTFGHKDECPCYRDMKNSKGGSKCP

SEQ ID NO: 426 - protein, 101 aa, Artificial Sequence
  Synthetic polypeptide
YEFREIKFFFLCVYVQGDELESQAQAPAIHKNGGEGSLKPEECPKACEYRCSATSHRKPCLFFCNKCCNKCLCVPSGTYGHKEECPCYNNWTTKEGGPKCP

SEQ ID NO: 427 - protein, 75 aa, Artificial Sequence
  Synthetic polypeptide
LVTSASKGSSFPKKIDCGGACAARCQLSSRPHLCKRACGTCCARSRCVPPGTAGNQEMCPCYASLTTHGGKRKCP

SEQ ID NO: 428 - protein, 90 aa, Artificial Sequence
  Synthetic polypeptide
MMISLLVFNPVEADGVVVNYGQHASLLAKIDCGGACKARCRLSSRPHLCKRACGTCCQRCSCVPPGTAGNYDVCPCYATLTTHGGKRKCP

SEQ ID NO: 429 - protein, 76 aa, Artificial Sequence
  Synthetic polypeptide
LVTSAGKGNSSPKKIDCGGACAARCQLSSRPHLCKRACGTCCARCACVPPGTAGNQEMCPKCYASLTTHGGKRKCP

SEQ ID NO: 430 - protein, 66 aa, Artificial Sequence
  Synthetic polypeptide
GSLHPQDCQPKCTYRCSKTSFKKPCMFFCQKCCAKCLCVPAGTYGNKQTCPCYNNWKTKEGGPKCP

SEQ ID NO: 431 - protein, 76 aa, Artificial Sequence
  Synthetic polypeptide
ADVESSQKKNGYAKKIDCGSACVARCRLSRRPRLCHRACGTCCYRCNCVPPGTYGNYDKCQCYASLTTHGGRRKCP

SEQ ID NO: 432 - protein, 80 aa, Artificial Sequence
  Synthetic polypeptide
YELHVHAADGAKVGEGVVKIDCGGRCKDRCSKSSRTKLCLRACNSCCSRCNCVPPGTSGNTHLCPCYASITTHGGRLKCP

SEQ ID NO: 433 - protein, 74 aa, Artificial Sequence
  Synthetic polypeptide
AAEDSQVGEGVVKIDCGGRCKGRCSKSSRPNLCLRACNSCCYRCNCVPPGTAGNHHLCPCYASITTRGGRLKCP

SEQ ID NO: 434 - protein, 66 aa, Artificial Sequence
  Synthetic polypeptide
GRLHPQDCQPKCTYRCSKTSYKKPCMFFCQKCCAKCLCVPAGTYGNKQSCPCYNNWKTKRGGPKCP

SEQ ID NO: 435 - protein, 78 aa, Artificial Sequence
  Synthetic polypeptide
SVSNLVQAARGGGKLKPQQCNSKCSYRCSATSHKKPCMFFCLKCCKKCLCVPPGTFGNKQTCPCYNNWKTKEGRPKCP

SEQ ID NO: 436 - protein, 99 aa, Artificial Sequence
  Synthetic polypeptide
IFLLTLIVLFMLQTMVMASSGSNVKWRQKRYGPGSLKRTQCPSECDRRCKKTQYHKACITFCNKCCRKCLCVPPGYYGNKQVCSCYNNWKTQEGGPKCP

SEQ ID NO: 437 - protein, 99 aa, Artificial Sequence
  Synthetic polypeptide
IFLLTLIVLFMLQTMVMASSGSNVKWSQKRYGPGSLKRTQCPSECDRRCKKTQYHKACITFCNKCCRKCLCVPPGYYGNKQVCSCYNNWKTQEGGPKCP

SEQ ID NO: 438 - protein, 64 aa, Artificial Sequence
  Synthetic polypeptide
LRPTDCKPRCTYRCSATSHKKPCMFFCQKCCATCLCVPKGVYGNKQSCPCYNNWKTQEGKPKCP

SEQ ID NO: 439 - protein, 63 aa, Artificial Sequence
  Synthetic polypeptide
KSYQCGGQCTRRCSNTKYHKPCMFFCQKCCAKCLCVPPGTYGNKQVCPCYNNWKTQQGGPKCP

SEQ ID NO: 440 - protein, 63 aa, Artificial Sequence
  Synthetic polypeptide
SKINCGAACKARCRLSSRPNLCHRACGTCCARCRCVPPGTSGNQKVCPCYYNMTTHGGRRKCP

SEQ ID NO: 441 - protein, 88 aa, Artificial Sequence
  Synthetic polypeptide
MKLFLLTLLLVTLVITPSLIQTTMAGSNFCDSKCKLRCSKAGLADRCLKYCGVCCEECKCVPSGTYGNKHECPCYRDKKNSKGKSKCP

SEQ ID NO: 442 - protein, 66 aa, Artificial Sequence
  Synthetic polypeptide
HEVQHIDCNAACAARCRLASRQRMCHRACGTCCRRCNCVPPGTSGNQEVCPCYASLATHGGRRKCP

SEQ ID NO: 443 - protein, 97 aa, Artificial Sequence
  Synthetic polypeptide
MAARSYSPIMVALSLLLLVTFSNVAEAYTRSGTLRPSDCKPKCTYRCSATSHKKPCMFFCQKCCAKCLCVPPGTYGNKQICPCYNSWKTKEGGPKCP

SEQ ID NO: 444 - protein, 106 aa, Artificial Sequence
  Synthetic polypeptide
MAMAKVFCVLLLALLGISMITTQVMATDSAYHLDGRNYGPGSLKSSQCPSECTRRCSQTQYHKPCMVFCKQCCKRCLCVPPGYYGNKSVCPCYNNWKTKRGGPKCP

SEQ ID NO: 445 - protein, 110 aa, Artificial Sequence
  Synthetic polypeptide
MAVANKLLSVLIIALIAISMLQTVVMASHGHGGHHYNDKKKYGPGSLKSFQCPSQCSRRCGKTQYHKPCMFFCQKCCRKCLCVPPGYYGNKAVCPCYNNWKTKEGGPKCP

SEQ ID NO: 446 - protein, 107 aa, Artificial Sequence
  Synthetic polypeptide
MAKFFAAMILALIAISMLQTVVMAANEQGGHLYDNKSKYGSGSVKRYQCPSQCSRRCSQTQYHKPCMFFCQKCCRKCLCVPPGYYGNKAVCPCYNNWKTKEGGPKCP

SEQ ID NO: 447 - protein, 107 aa, Artificial Sequence
  Synthetic polypeptide
MAKFFAAMILALFAISILQTVVMAANEQGGHLYDNKSKYGSGSVKSYQCPSQCSRRCSQTQYHKPCMFFCQKCCRTCLCVPPGYYGNKAVCPCYNNWKTKEGGPKCP

SEQ ID NO: 448 - protein, 191 aa, Artificial Sequence
  Synthetic polypeptide
MASNSILLLCIFLVVATKVFSYDEDLKTVVPAPAPPVKAPTLAPPVKSPSYPPGPVTTPTVPTPTVKVPPPPQSPVVKPPTPTVPPPTVKVPPPPQSPVVKPPTPTPTSPVVYPPPVAPSPPAPVVKSNKDCIPLCDYRCSLHSRKKLCMRACITCCDRCKCVPPGTYGNREKCGKCYTDMLTHGNKFKCP

SEQ ID NO: 449 - protein, 115 aa, Artificial Sequence
  Synthetic polypeptide
MEKKRKTLLLLLLMAATLFCMPIVSYAVSSVNIQGHLTHSELVKGPNRRLLPFVDCGARCRVRCSLHSRPKICSRACGTCCFRCRCVPPGTYGNREMCGKCYTDMITHGNKPKCP

SEQ ID NO: 450 - protein, 99 aa, Artificial Sequence
  Synthetic polypeptide
MALSKLIIASLLASLLLLHFVDADQSAHAQTQGSLLQQIDCNGACAARCRLSSRPRLCQRACGTCCRRCNCVPPGTAGNQEVCPCYASLTTHGGKRKCP

SEQ ID NO: 451 - protein, 119 aa, Artificial Sequence
  Synthetic polypeptide
MALRVLLVLGMLLMLCLVKVSSDPKIEEEILEAEEELQFPDNEPLIVRDANRRLMQDMDCGGLCKTRCSAHSRPNLCTRACGTCCVRCKCVPPGTSGNRELCGTCYTDMTTHGNKTKCP

SEQ ID NO: 452 - protein, 117 aa, Artificial Sequence
  Synthetic polypeptide
MAPRVFLVLGMLLMVCLVKVSSDPKREEEILEEELHFPDNEPLIVRDGNRRLMQDIDCGGLCKTRCSAHSRPNLCTRACGTCCVRCKCVPPGTSGNRELCGTCYTDMTTHGNKTKCP

SEQ ID NO: 453 - protein, 108 aa, Artificial Sequence
  Synthetic polypeptide
MMGILLLVCLAKVSSDVNMQKEEDEELRFPNHPLIVRDGNRRLMQDIDCGGLCKTRCSAHSRPNVCNRACGTCCVRCKCVPPGTSGNRELCGTCYTDMITHGNKTKCP

SEQ ID NO: 454 - protein, 90 aa, Artificial Sequence
  Synthetic polypeptide
MKLVFATLLLCSLLLSSSFLEPVIAYEDSSYCSNKCSDRCSSAGVKDRCLRYCGICCAECKCVPSGTYGNKHQCPCYRDKLNKKGKPKCP

SEQ ID NO: 455 - protein, 88 aa, Artificial Sequence
  Synthetic polypeptide
MKLEFANVLLLCLVLSSSFLEISMAGSPFCDSKCAQRCAKAGVQDRCLRFCGICCEKCNCVPSGTYGNKDECPCYRDMKNSKGKDKCP

SEQ ID NO: 456 - protein, 105 aa, Artificial Sequence
  Synthetic polypeptide
MAPGKLAVFALLASLLLLNTIKAADYPPAPPLGPPPHKIVDPGKDCVGACDARCSEHSHKKRCSRSCLTCCSACRCVPAGTAGNRETCGRCYTDWVSHNNMTKCP

SEQ ID NO: 457 - protein, 103 aa, Artificial Sequence
  Synthetic polypeptide
MLLLALAAHHQAASDPPATHGGMRASGTRSLLQQQPPPPRLDCPKVCAGRCANNWRKEMCNDKCNVCCQRCNCVPPGTGQDTRHICPCYATMTNPHNGKLKCP

SEQ ID NO: 458 - protein, 114 aa, Artificial Sequence
  Synthetic polypeptide
MVTKVICFLVLASVLLAVAFPVSALRQQVKKGGGGEGGGGGSVSGSGGGNLNPWECSPKCGSRCSKTQYRKACLTLCNKCCAKCLCVPPGFYGNKGACPCYNNWKTREGGPKCP

SEQ ID NO: 459 - protein, 98 aa, Artificial Sequence
  Synthetic polypeptide
  misc_feature (64)..(64): Xaa can be any naturally occurring amino acid
MSKPSRCRAVQTQVALLLLLLVAASLLQAGDAASGFCAGKCAVRCGRSRAKRGACMKYCGLCCXECACVPTGRSGSRDECPCYRDMLTAGPRKRPKCP

SEQ ID NO: 460 - protein, 107 aa, Artificial Sequence
  Synthetic polypeptide
MKPLPVTLALLALFLVASYQDLTVAADADADAAGAGDVGAVPVPDSVCEGKCKNRCSQKVAGRCMGLCMMCCGKCAGCVPSGPLAPKDECPCYRDMKSPKSGRPKCP

SEQ ID NO: 461 - protein, 98 aa, Artificial Sequence
  Synthetic polypeptide
MKKLRTTTATTTLALILLLVLIAATSLRVAMAGSAFCDSKCGVRCSKAGRHDDCLKYCGICCAECNCVPSGTAGNKDECPCYRDKTTGHGARTRPKCP

SEQ ID NO: 462 - protein, 94 aa, Artificial Sequence
  Synthetic polypeptide
MKKLRTTTLALLLLLVFLAASSLRAAMAGSAFCDGKCGVRCSKASRHDDCLKYCGICCAECNCVPSGTAGNKDECPCYRDKTTGHGARKRPKCP

SEQ ID NO: 463 - protein, 77 aa, Artificial Sequence
  Synthetic polypeptide
MGGGNGGAGGGGKLKPWECSSKCSSRCSGTQYKKACLTYCNKCCATCLCVPPGTYGNKGACPCYNNWKTKEGGPKCP

SEQ ID NO: 464 - protein, 215 aa, Artificial Sequence
  Synthetic polypeptide
MESKSPWSLRLLICCAAMVAIALLPQQGGQAACFVPTPGPAPAPPGSSATNTNASSAAPRPAKPSAFPPPMYGGVTPGTGSLQPHECGGRCAERCSATAYQKPCLFFCRKCCAACLCVPPGTYGNKNTCPCYNNWKTKRGMYGGVTPGTGSLQPHECGGRCAERCSATAYQKPCLFFCRKCCAACLCVPPGTYGNKNTCPCYNNWKTKRGGPKCP

SEQ ID NO: 465 - protein, 94 aa, Artificial Sequence
  Synthetic polypeptide
MAKASSRLLFSLSLVVLLLLVETTTSPHGQADAIDCGASCSYRCSKSGRPKMCLRACGTCCQRCGCVPPGTSGNEDVCPCYANMKTHDGQHKCP

SEQ ID NO: 466 - protein, 96 aa, Artificial Sequence
  Synthetic polypeptide
MKAIPVALLLLVLVAAASSFKHLAEAADGGAVPDGVCDGKCRSRCSLKKAGRCMGLCMMCCGKCQGCVPSGPYASKDECPCYRDMKSPKNQRPKCP

SEQ ID NO: 467 - protein, 128 aa, Artificial Sequence
  Synthetic polypeptide
MMTTMKKKKQQQQLLLLSLMFLVAVTAAAVAADPHPQQVQVQQQQQAQMRINRATRSLLPQPPPKLDCPSTCSVRCGNNWKNQMCNKMCNVCCNKCSCVPPGTGQDTRHLCPCYDTMLNPHTGKLKCP

SEQ ID NO: 468 - protein, 100 aa, Artificial Sequence
  Synthetic polypeptide
MAVAKPPLQTAAVLLLLLLVVAAASWLQTVDAASGFCSSKCSVRCGRAASARARGACMRSCGLCCEECNCVPTRPPRDVNECPCYRDMLTAGPRKRPKCP

SEQ ID NO: 469 - protein, 115 aa, Artificial Sequence
  Synthetic polypeptide
MAPSKLAVVVALVASLLLLTTSNTKLGLFVLGQAAPGAYPPRAPPPHQIVDLAKDCGGACDVRCGAHSRKNICTRACLKCCGVCRCVPAGTAGNQQTCGKCYTDWTTHGNKTKCP

SEQ ID NO: 470 - protein, 95 aa, Artificial Sequence
  Synthetic polypeptide
MKLQATARVAGLLFLVLLLALPSLRVSMAGSGFCDGKCAVRCSKASRHDDCLKYCGICCATCNCVPSGTAGNKDECPCYRDMTTGHGNRTRPKCP

SEQ ID NO: 471 - protein, 114 aa, Artificial Sequence
  Synthetic polypeptide
MVTKVICFLVLASVLLAVAFPVSALRQQVKKGGGGEGGGGGSVSGSGGGNLNPWECSPKCGSRCSKTQYRKACLTLCNKCCAKCLCVPPGFYGNKGACPCYNNWKTKEGGPKCP

SEQ ID NO: 472 - protein, 255 aa, Artificial Sequence
  Synthetic polypeptide
MNNLHRELAPIASAAWEQIEEEVARTFKRSVAGRRVVDVEGPKGPALSAVGTGHLRDVDAPREQVSARLREVRAIVELTVPFELSRDAIDSVERGARDADWQPAKDAAQRLAFAEDHAIFDGYAAAGIIGIREGSSNRRLTLPDDVGAYPDAISDALEALRLAGVDGPYSVLLGADAYTALSEARDQGYPVIDHIKRIVSGEIIWAPAISGGCVLSTRGGDYELHLGEDVSIGYTSHTDKVVRLYLRETFTFLML

SEQ ID NO: 473 - protein, 255 aa, Artificial Sequence
  Synthetic polypeptide
MNNLHRELAPISSAAWEQIEEEVARTFKRSVAGRRVVDVEGPAGPELSAVGTGHLLDVAAPRELVNARLREVRTIVELTVPFELSRDAIDSVERGARDADWQPAKEAAQRLAFAEDNAIFDGYPAAGIVGIREGTSNRRLTLPADVGAYPDAISDALEALRLAGVDGPYSVVLGSDAYTALSEARDQGYPVLGHIKRIVSGEIIWAPAISGGCVLSTRGGDYELHLGEDVSIGYTSHTDKGVRLYLRETFTFLML

SEQ ID NO: 474 - protein, 16 aa, Artificial Sequence
  Synthetic polypeptide
KFAKKAAKKFAKKAAK

SEQ ID NO: 475 - protein, 16 aa, Artificial Sequence
  Synthetic polypeptide
KFAKKFAKKAAKKAAK

SEQ ID NO: 476 - protein, 16 aa, Artificial Sequence
  Synthetic polypeptide
KFAKKFAKKFAKKAAK

SEQ ID NO: 477 - protein, 17 aa, Artificial Sequence
  Synthetic polypeptide
FKLRAKIKVRLRAKIKL

SEQ ID NO: 478 - protein, 23 aa, Artificial Sequence
  Synthetic polypeptide
FAKKFAKKFKKFAKKFAKFAFAF

SEQ ID NO: 479 - protein, 21 aa, Artificial Sequence
  Synthetic polypeptide
KGKKGKKGKKGKKGKKGKKGK

SEQ ID NO: 480 - protein, 12 aa, Artificial Sequence
  Synthetic polypeptide
KFKKFKKFKKFK

SEQ ID NO: 481 - protein, 9 aa, Artificial Sequence
  Synthetic polypeptide
KFKKFKKFK

SEQ ID NO: 482 - protein, 80 aa, Artificial Sequence
  Synthetic polypeptide
KFAKKFAKKFAKKFAKKFAKKFAKKFAKKFAKKFAKKFAKKFAKKFAKKFAKKFAKKFAKKFAKKFAKKFAKKFAKKFAK

SEQ ID NO: 483 - protein, 14 aa, Artificial Sequence
  Synthetic polypeptide
LKLKLKLKLKLKLK

SEQ ID NO: 484 - protein, 12 aa, Artificial Sequence
  Synthetic polypeptide
KFAKKFAKKFAK

SEQ ID NO: 485 - protein, 8 aa, Artificial Sequence
  Synthetic polypeptide
KFAKKFAK

SEQ ID NO: 486 - protein, 4 aa, Artificial Sequence
  Synthetic polypeptide
KFAK

SEQ ID NO: 487 - protein, 21 aa, Artificial Sequence
  Synthetic polypeptide
KTKKTKKTKKTKKTKKTKKTK

SEQ ID NO: 488 - protein, 45 aa, Artificial Sequence
  Synthetic polypeptide
KGKKGKKGKKGKKGKKGKKGKKGKKGKKGKKGKKGKKGKKGKKGK

SEQ ID NO: 489 - protein, 33 aa, Artificial Sequence
  Synthetic polypeptide
KGKKGKKGKKGKKGKKGKKGKKGKKGKKGKKGK

SEQ ID NO: 490 - protein, 22 aa, Artificial Sequence
  Synthetic polypeptide
LRLRLRLRLRLRLRLRLRLRLR

SEQ ID NO: 491 - protein, 18 aa, Artificial Sequence
  Synthetic polypeptide
LRLRLRLRLRLRLRLRLR

SEQ ID NO: 492 - protein, 14 aa, Artificial Sequence
  Synthetic polypeptide
LRLRLRLRLRLRLR

SEQ ID NO: 493 - protein, 48 aa, Artificial Sequence
  Synthetic polypeptide
LKLKLKLKLKLKLKLKLKLKLKLKLKLKLKLKLKLKLKLKLKLKLKLK

SEQ ID NO: 494 - protein, 36 aa, Artificial Sequence
  Synthetic polypeptide
LKLKLKLKLKLKLKLKLKLKLKLKLKLKLKLKLKLK

SEQ ID NO: 495 - protein, 24 aa, Artificial Sequence
  Synthetic polypeptide
LKLKLKLKLKLKLKLKLKLKLKLK

SEQ ID NO: 496 - protein, 22 aa, Artificial Sequence
  Synthetic polypeptide
LKLKLKLKLKLKLKLKLKLKLK

SEQ ID NO: 497 - protein, 20 aa, Artificial Sequence
  Synthetic polypeptide
LKLKLKLKLKLKLKLKLKLK

SEQ ID NO: 498 - protein, 18 aa, Artificial Sequence
  Synthetic polypeptide
LKLKLKLKLKLKLKLKLK

SEQ ID NO: 499 - protein, 16 aa, Artificial Sequence
  Synthetic polypeptide
LKLKLKLKLKLKLKLK

SEQ ID NO: 500 - protein, 10 aa, Artificial Sequence
  Synthetic polypeptide
LKLKLKLKLK

SEQ ID NO: 501 - protein, 4 aa, Artificial Sequence
  Synthetic polypeptide
LKLK

SEQ ID NO: 502 - protein, 63 aa, Artificial Sequence
  Synthetic polypeptide
FKAFKAFKAFKAFKAFKAFKAFKAFKAFKAFKAFKAFKAFKAFKAFKAFKAFKAFKAFKAFKA

SEQ ID NO: 503 - protein, 51 aa, Artificial Sequence
  Synthetic polypeptide
FKAFKAFKAFKAFKAFKAFKAFKAFKAFKAFKAFKAFKAFKAFKAFKAFKA

SEQ ID NO: 504 - protein, 30 aa, Artificial Sequence
  Synthetic polypeptide
FKAFKAFKAFKAFKAFKAFKAFKAFKAFKA

SEQ ID NO: 505 - protein, 27 aa, Artificial Sequence
  Synthetic polypeptide
FKAFKAFKAFKAFKAFKAFKAFKAFKA

SEQ ID NO: 506 - protein, 24 aa, Artificial Sequence
  Synthetic polypeptide
FKAFKAFKAFKAFKAFKAFKAFKA

SEQ ID NO: 507 - protein, 21 aa, Artificial Sequence
  Synthetic polypeptide
FKAFKAFKAFKAFKAFKAFKA

SEQ ID NO: 508 - protein, 18 aa, Artificial Sequence
  Synthetic polypeptide
FKAFKAFKAFKAFKAFKA

SEQ ID NO: 509 - protein, 12 aa, Artificial Sequence
  Synthetic polypeptide
FKAFKAFKAFKA

SEQ ID NO: 510 - protein, 6 aa, Artificial Sequence
  Synthetic polypeptide
FKAFKA

SEQ ID NO: 511 - protein, 63 aa, Artificial Sequence
  Synthetic polypeptide
KFKKFKKFKKFKKFKKFKKFKKFKKFKKFKKFKKFKKFKKFKKFKKFKKFKKFKKFKKFKKFK

SEQ ID NO: 512 - protein, 48 aa, Artificial Sequence
  Synthetic polypeptide
KFKKFKKFKKFKKFKKFKKFKKFKKFKKFKKFKKFKKFKKFKKFKKFK

SEQ ID NO: 513 - protein, 36 aa, Artificial Sequence
  Synthetic polypeptide
KFKKFKKFKKFKKFKKFKKFKKFKKFKKFKKFKKFK

SEQ ID NO: 514 - protein, 30 aa, Artificial Sequence
  Synthetic polypeptide
KFKKFKKFKKFKKFKKFKKFKKFKKFKKFK

SEQ ID NO: 515 - protein, 27 aa, Artificial Sequence
  Synthetic polypeptide
KFKKFKKFKKFKKFKKFKKFKKFKKFK

SEQ ID NO: 516 - protein, 24 aa, Artificial Sequence
  Synthetic polypeptide
KFKKFKKFKKFKKFKKFKKFKKFK

SEQ ID NO: 517 - protein, 21 aa, Artificial Sequence
  Synthetic polypeptide
KFKKFKKFKKFKKFKKFKKFK

SEQ ID NO: 518 - protein, 18 aa, Artificial Sequence
  Synthetic polypeptide
KFKKFKKFKKFKKFKKFK

SEQ ID NO: 519 - protein, 15 aa, Artificial Sequence
  Synthetic polypeptide
KFKKFKKFKKFKKFK

SEQ ID NO: 520 - protein, 28 aa, Artificial Sequence
  Synthetic polypeptide
KKAKKKAKKKAKKKAKKKAKKKAKKKAK

SEQ ID NO: 521 - protein, 28 aa, Artificial Sequence
  Synthetic polypeptide
KAAKKAAKKAAKKAAKKAAKKAAKKAAK

SEQ ID NO: 522 - protein, 28 aa, Artificial Sequence
  Synthetic polypeptide
KFAKKFAKKFAKKFAKKFAKKFAKKFAK

SEQ ID NO: 523 - protein, 28 aa, Artificial Sequence
  Synthetic polypeptide
KFFKKFFKKFFKKFFKKFFKKFFKKFFK

SEQ ID NO: 524 - protein, 28 aa, Artificial Sequence
  Synthetic polypeptide
KFAFKFAFKFAFKFAFKFAFKFAFKFAF

SEQ ID NO: 525 - protein, 32 aa, Artificial Sequence
  Synthetic polypeptide
LKKLLKKLLKKLLKKLLKKLLKKLLKKLLKKL

SEQ ID NO: 526 - protein, 28 aa, Artificial Sequence
  Synthetic polypeptide
LKKLLKKLLKKLLKKLLKKLLKKLLKKL

SEQ ID NO: 527 - protein, 24 aa, Artificial Sequence
  Synthetic polypeptide
LKKLLKKLLKKLLKKLLKKLLKKL

SEQ ID NO: 528 - protein, 20 aa, Artificial Sequence
  Synthetic polypeptide
LKKLLKKLLKKLLKKLLKKL

SEQ ID NO: 529 - protein, 24 aa, Artificial Sequence
  Synthetic polypeptide
KKFAKKFAKKFAKKFAKKFAKKFA

SEQ ID NO: 530 - protein, 24 aa, Artificial Sequence
  Synthetic polypeptide
AKKFAKKFAKKFAKKFAKKFAKKF

SEQ ID NO: 531 - protein, 24 aa, Artificial Sequence
  Synthetic polypeptide
FAKKFAKKFAKKFAKKFAKKFAKK

SEQ ID NO: 532 - protein, 32 aa, Artificial Sequence
  Synthetic polypeptide
RFARRFARRFARRFARRFARRFARRFARRFAR

SEQ ID NO: 533 - protein, 28 aa, Artificial Sequence
  Synthetic polypeptide
RFARRFARRFARRFARRFARRFARRFAR

SEQ ID NO: 534 - protein, 24 aa, Artificial Sequence
  Synthetic polypeptide
RFARRFARRFARRFARRFARRFAR

SEQ ID NO: 535 - protein, 84 aa, Artificial Sequence
  Synthetic polypeptide
KFAKKFAKKFAKKFAKKFAKKFAKKFAKKFAKKFAKKFAKKFAKKFAKKFAKKFAKKFAKKFAKKFAKKFAKKFAKKFAKKFAK

SEQ ID NO: 536 - protein, 68 aa, Artificial Sequence
  Synthetic polypeptide
KFAKKFAKKFAKKFAKKFAKKFAKKFAKKFAKKFAKKFAKKFAKKFAKKFAKKFAKKFAKKFAKKFAK

SEQ ID NO: 537 - protein, 48 aa, Artificial Sequence
  Synthetic polypeptide
KFAKKFAKKFAKKFAKKFAKKFAKKFAKKFAKKFAKKFAKKFAKKFAK

SEQ ID NO: 538 - protein, 32 aa, Artificial Sequence
  Synthetic polypeptide
KFAKKFAKKFAKKFAKKFAKKFAKKFAKKFAK

SEQ ID NO: 539 - protein, 24 aa, Artificial Sequence
  Synthetic polypeptide
KFAKKFAKKFAKKFAKKFAKKFAK

SEQ ID NO: 540 - protein, 20 aa, Artificial Sequence
  Synthetic polypeptide
KFAKKFAKKFAKKFAKKFAK

SEQ ID NO: 541 - protein, 16 aa, Artificial Sequence
  Synthetic polypeptide
KFAKKFAKKFAKKFAK

SEQ ID NO: 542 - protein, 10 aa, Artificial Sequence
  Synthetic polypeptide
RIIRKIIHII

SEQ ID NO: 543 - protein, 11 aa, Artificial Sequence
  Synthetic polypeptide
RIIRKIIHIIK

SEQ ID NO: 544 - protein, 11 aa, Artificial Sequence
  Synthetic polypeptide
RRIIRKIIHII

SEQ ID NO: 545 - protein, 16 aa, Artificial Sequence
  Synthetic polypeptide
NIRRIIRKIIHIIKKY

SEQ ID NO: 546 - protein, 16 aa, Artificial Sequence
  Synthetic polypeptide
NLRRIIRKIIHIIKKY

SEQ ID NO: 547 - protein, 18 aa, Artificial Sequence
  Synthetic polypeptide
RGLRALGRKIAHGVKAYG

SEQ ID NO: 548 - protein, 29 aa, Artificial Sequence
  Synthetic polypeptide
KNLRRIIRKIIHIIKKYGPTILRIIRIIG

SEQ ID NO: 549 - protein, 28 aa, Artificial Sequence
  Synthetic polypeptide
RGLRRLGRKIAHGVKKYGPTVLRIIRIA

SEQ ID NO: 550 - protein, 17 aa, Artificial Sequence
  Synthetic polypeptide
KIKEKLKKIGQKIQGLL

SEQ ID NO: 551 - protein, 15 aa, Artificial Sequence
  Synthetic polypeptide
KIKEKLKKIGQKIQG

SEQ ID NO: 552 - protein, 15 aa, Artificial Sequence
  Synthetic polypeptide
RKFRNKIKEKLKKIG

SEQ ID NO: 553 - protein, 21 aa, Artificial Sequence
  Synthetic polypeptide
LRKFRNKIKEKLKKIGQKIQG

SEQ ID NO: 554 - protein, 19 aa, Artificial Sequence
  Synthetic polypeptide
LRKFRNKIKEKLKKIGQKI

SEQ ID NO: 555 - protein, 22 aa, Artificial Sequence
  Synthetic polypeptide
RKRLRKFRNKIKEKLKKIGQKI

SEQ ID NO: 556 - protein, 18 aa, Artificial Sequence
  Synthetic polypeptide
KRLRKFRNKIKEKLKKIG

SEQ ID NO: 557 - protein, 21 aa, Artificial Sequence
  Synthetic polypeptide
GLRKRLRKFRNKIKEKLKKIG

SEQ ID NO: 558 - protein, 37 aa, Artificial Sequence
  Synthetic polypeptide
GLRKRLRKFRNKIKEKLKKIGQKIQGLLPKLAPRTDY

SEQ ID NO: 559 - protein, 12 aa, Artificial Sequence
  Synthetic polypeptide
RRIIRKIIHIIK

SEQ ID NO: 560 - protein, 13 aa, Artificial Sequence
  Synthetic polypeptide
RRIIRKIIHIIKK

SEQ ID NO: 561 - protein, 13 aa, Artificial Sequence
  Synthetic polypeptide
LRRIIRKIIHIIK

SEQ ID NO: 562 - protein, 14 aa, Artificial Sequence
  Synthetic polypeptide
IRRIIRKIIHIIKK

SEQ ID NO: 563 - protein, 14 aa, Artificial Sequence
  Synthetic polypeptide
LRRIIRKIIHIIKK

SEQ ID NO: 564 - protein, 18 aa, Artificial Sequence
  Synthetic polypeptide
KNLRRIIRKIIHIIKKYG

SEQ ID NO: 565 - protein, 18 aa, Artificial Sequence
  Synthetic polypeptide
KNIRRIIRKIIHIIKKYG

SEQ ID NO: 566 - protein, 18 aa, Artificial Sequence
  Synthetic polypeptide
RGLRRLGRKIAHGVKKYG

SEQ ID NO: 567 - protein, 20 aa, Artificial Sequence
  Synthetic polypeptide
LGRKIAHGVKKYGPTVLRII

SEQ ID NO: 568 - protein, 21 aa, Artificial Sequence
  Synthetic polypeptide
KIAHGVKKYGPTVLRIIRIAG

SEQ ID NO: 569 - protein, 29 aa, Artificial Sequence
  Synthetic polypeptide
RGLRRLGRKIAHGVKKYGPTVLRIIRIAG

SEQ ID NO: 570 - protein, 40 aa, Artificial Sequence
  Synthetic polypeptide
HPHVCTSYYCSKFCGTAGCTRYGCRNLHRGKLCFCLHCSR

SEQ ID NO: 571 - protein, 40 aa, Artificial Sequence
  Synthetic polypeptide
HSHACTSYWCGKFCGTASCTHYLCRVLHPGKMCACVHCSR

SEQ ID NO: 572 - protein, 40 aa, Artificial Sequence
  Synthetic polypeptide
  misc_feature (2)..(2): Xaa can be any naturally occurring amino acid
  misc_feature (4)..(4): Xaa can be any naturally occurring amino acid
  misc_feature (9)..(9): Xaa can be any naturally occurring amino acid
  misc_feature (11)..(11): Xaa can be any naturally occurring amino acid
  misc_feature (18)..(18): Xaa can be any naturally occurring amino acid
  misc_feature (21)..(21): Xaa can be any naturally occurring amino acid
  misc_feature (23)..(23): Xaa can be any naturally occurring amino acid
  misc_feature (26)..(26): Xaa can be any naturally occurring amino acid
  misc_feature (29)..(29): Xaa can be any naturally occurring amino acid
  misc_feature (32)..(32): Xaa can be any naturally occurring amino acid
  misc_feature (34)..(34): Xaa can be any naturally occurring amino acid
  misc_feature (36)..(36): Xaa can be any naturally occurring amino acid
HXHXCTSYXCXKFCGTAXCTXYXCRXLHXGKXCXCXHCSR

SEQ ID NO: 573 - protein, 96 aa, Artificial Sequence
  Synthetic polypeptide
MKATMLLAVVVAVFVAGTEAHPHVCTSYYCSKFCGTAGCTRYGCRNLHRGKLCFCLHCSRVKFPFGATQDAKSMNELEYTPIMKSMENLDNGMDML

SEQ ID NO: 574 - protein, 96 aa, Artificial Sequence
  Synthetic polypeptide
MKATILLAVLVAVFVAGTEAHSHACTSYWCGKFCGTASCTHYLCRVLHPGKMCACVHCSRVNNPFRVNQVAKSINDLDYTPIMKSMENLDNGMDML

SEQ ID NO: 575 - protein, 28 aa, Artificial Sequence
  Synthetic polypeptide
KWKLFKKIGIGAVLKVLTTGLPALKKTK

SEQ ID NO: 576 - protein, 26 aa, Artificial Sequence
  Synthetic polypeptide
KWKLFKKIGIGAVLKVLTTGLPALIS

SEQ ID NO: 577 - protein, 24 aa, Artificial Sequence
  Synthetic polypeptide
  misc_feature (7)..(9): Xaa can be any naturally occurring amino acid
KKWWRRXXXGLKTAGPAIQSVLNK

SEQ ID NO: 578 - protein, 8 aa, Artificial Sequence
  Synthetic polypeptide
KWKSFIKK

SEQ ID NO: 579 - protein, 6 aa, Artificial Sequence
  Synthetic polypeptide
  misc_feature (6)..(6): Xaa can be any naturally occurring amino acid
KKWWKX

SEQ ID NO: 580 - protein, 7 aa, Artificial Sequence
  Synthetic polypeptide
  misc_feature (7)..(7): Xaa can be any naturally occurring amino acid
KKWWRRX

SEQ ID NO: 581 - protein, 18 aa, Artificial Sequence
  Synthetic polypeptide
KKWRKSFFKQVGSFDNSV

SEQ ID NO: 582 - protein, 20 aa, Artificial Sequence
  Synthetic polypeptide
WKVFKSFIKKASSFAQSVLD

SEQ ID NO: 583 - protein, 17 aa, Artificial Sequence
  Synthetic polypeptide
KKSFFKKLTSVASSVLS

SEQ ID NO: 584 - protein, 23 aa, Artificial Sequence
  Synthetic polypeptide
KKWWKFIKKAVNSGTTGLQTLAS

SEQ ID NO: 585 - protein, 22 aa, Artificial Sequence
  Synthetic polypeptide
KKWWKAKKFANSGPNALQTLAQ

SEQ ID NO: 586 - protein, 22 aa, Artificial Sequence
  Synthetic polypeptide
KKWWKAQKAVNSGPNALQTLAQ

SEQ ID NO: 587 - protein, 24 aa, Artificial Sequence
  Synthetic polypeptide
KKWWRRALQGLKTAGPAIQSVLNK

SEQ ID NO: 588 - protein, 24 aa, Artificial Sequence
  Synthetic polypeptide
KKWWRRVLSGLKTAGPAIQSVLNK

SEQ ID NO: 589 - protein, 20 aa, Artificial Sequence
  Synthetic polypeptide
KKWWRRALQALKNGPALSNV

SEQ ID NO: 590 - protein, 20 aa, Artificial Sequence
  Synthetic polypeptide
KKWWRRVLKGLSSGPALSNV

SEQ ID NO: 591 - protein, 20 aa, Artificial Sequence
  Synthetic polypeptide
KKWWRRVLSGLKTGPALSNV

SEQ ID NO: 592 - protein, 26 aa, Artificial Sequence
  Synthetic polypeptide
KWKKFIKELQKVLKPGGLLSNIVTSL

SEQ ID NO: 593 - protein, 26 aa, Artificial Sequence
  Synthetic polypeptide
KKKSFIKLLTSAKVSVLTTAKPLISS

SEQ ID NO: 594 - protein, 26 aa, Artificial Sequence
  Synthetic polypeptide
KWKSFIKKLTSVLKKVVTTAKPLISS

SEQ ID NO: 595 - protein, 26 aa, Artificial Sequence
  Synthetic polypeptide
KWKLFKKKGTGAVLTVLTTGLPALIS

SEQ ID NO: 596 - protein, 26 aa, Artificial Sequence
  Synthetic polypeptide
KWKSFIKNLTKVLKKVVTTALPALIS

SEQ ID NO: 597 - protein, 26 aa, Artificial Sequence
  Synthetic polypeptide
KWKSFIKKLTSVLKKVVTTALPALIS

SEQ ID NO: 598 - protein, 26 aa, Artificial Sequence
  Synthetic polypeptide
KWKKFIKELQKVLAPGGLLSNIVTSL

SEQ ID NO: 599 - protein, 26 aa, Artificial Sequence
  Synthetic polypeptide
KWKEFIKKLTTAVKKVLTTGLPALIS

SEQ ID NO: 600 - protein, 26 aa, Artificial Sequence
  Synthetic polypeptide
KWKSFIKNLEKVLKKGPILANLVSIV

SEQ ID NO: 601 - protein, 26 aa, Artificial Sequence
  Synthetic polypeptide
KWKSFIKNLEKVLKPGGLLSNIVTSL

SEQ ID NO: 602 - protein, 26 aa, Artificial Sequence
  Synthetic polypeptide
KWKKFIKNLTKGGSKILTTGLPALIS

SEQ ID NO: 603 - protein, 26 aa, Artificial Sequence
  Synthetic polypeptide
KWKSFIKNLTKGGSKILTTGLPALIS

SEQ ID NO: 604 - protein, 26 aa, Artificial Sequence
  Synthetic polypeptide
KWKSFIKKLTSAAKKVVTTAKPLISS

SEQ ID NO: 605 - protein, 26 aa, Artificial Sequence
  Synthetic polypeptide
KWKSFIKKLTTAVKKVLTTGLPALIS

SEQ ID NO: 606 - protein, 48 aa, Artificial Sequence
  Synthetic polypeptide
RVVRVVRRWVRRVRRVWRRVVRVVRRWVRRVRRVWRRVVRVVRRWRVV

SEQ ID NO: 607 - protein, 36 aa, Artificial Sequence
  Synthetic polypeptide
VRRVWRRVVRVVRRWVRRVRRVWRRVVRVVRRWVRR

SEQ ID NO: 608 - protein, 24 aa, Artificial Sequence
  Synthetic polypeptide
RRWVRRVRRVWRRVVRVVRRWVRR

SEQ ID NO: 609 - protein, 12 aa, Artificial Sequence
  Synthetic polypeptide
RVVRVVRRWVRR

SEQ ID NO: 610 - protein, 48 aa, Artificial Sequence
  Synthetic polypeptide
RVVRVVRRVVRRVRRVVRRVVRVVRRVVRRVRRVVRRVVRVVRRVVRR

SEQ ID NO: 611 - protein, 42 aa, Artificial Sequence
  Synthetic polypeptide
RRVVRRVRRVVRRVVRVVRRVVRRVRRVVRRVVRVVRRVVRR

SEQ ID NO: 612 - protein, 36 aa, Artificial Sequence
  Synthetic polypeptide
VRRVVRRVVRVVRRVVRRVRRVVRRVVRVVRRVVRR

SEQ ID NO: 613 - protein, 24 aa, Artificial Sequence
  Synthetic polypeptide
RRVVRRVRRVVRRVVRVVRRVVRR

SEQ ID NO: 614 - protein, 12 aa, Artificial Sequence
  Synthetic polypeptide
RVVRVVRRVVRR

SEQ ID NO: 615 - protein, 31 aa, Artificial Sequence
  Synthetic polypeptide
RWIRVVQRWCRAIRHIWRRIRQGLRRWLRVV

SEQ ID NO: 616 - protein, 31 aa, Artificial Sequence
  Synthetic polypeptide
RVIRVVQRACRAIRHIVRRIRQGLRRILRVV

SEQ ID NO: 617 - protein, 28 aa, Artificial Sequence
  Synthetic polypeptide
RVIRVVQRACRAIRHIVRRIRQGLRRIL

SEQ ID NO: 618 - protein, 6 aa, Artificial Sequence
  Synthetic polypeptide
MQYNRR

SEQ ID NO: 619 - protein, 18 aa, Artificial Sequence
  Synthetic polypeptide
FVNVVPTFGKKKGPNANS

SEQ ID NO: 620 - protein, 7 aa, Artificial Sequence
  Synthetic polypeptide
TGRAKRR

SEQ ID NO: 621 - protein, 20 aa, Artificial Sequence
  Synthetic polypeptide
AKVAKQEKKKKKTGRAKRRA

SEQ ID NO: 622 - protein, 18 aa, Artificial Sequence
  Synthetic polypeptide
KVAKQEKKKKKTGRAKRR

SEQ ID NO: 623 - protein, 12 aa, Artificial Sequence
  Synthetic polypeptide
KVAKQEKKKKKT

SEQ ID NO: 624 - protein, 13 aa, Artificial Sequence
  Synthetic polypeptide
TGRAKRRMQYNRR

SEQ ID NO: 625 - protein, 18 aa, Artificial Sequence
  Synthetic polypeptide
KVHGSLARAGKVRGQTPK

SEQ ID NO: 626 - protein, 59 aa, Artificial Sequence [sequence omitted]

SEQ ID NO: 627 - protein, 93 aa, Artificial Sequence
  Synthetic polypeptide
MKLNTTTTLALLLLLLLASSSLQVSMAGSDFCDGKCKVRCSKASRHDDCLKYCGVCCASCNCVPSGTAGNKDECPCYRDMTTGHGARKRPKCP

SEQ ID NO: 628 - protein, 70 aa, Artificial Sequence; identical to SEQ ID NO: 423
  Synthetic polypeptide

SEQ ID NO: 629 - protein, 78 aa, Artificial Sequence; identical to SEQ ID NO: 435
  Synthetic polypeptide

SEQ ID NO: 630 - protein, 97 aa, Artificial Sequence; identical to SEQ ID NO: 443
  Synthetic polypeptide

SEQ ID NO: 631 - protein, 107 aa, Artificial Sequence; identical to SEQ ID NO: 446
  Synthetic polypeptide

SEQ ID NO: 632 - protein, 107 aa, Artificial Sequence; identical to SEQ ID NO: 447
  Synthetic polypeptide

SEQ ID NO: 633 - protein, 191 aa, Artificial Sequence; identical to SEQ ID NO: 448
  Synthetic polypeptide

SEQ ID NO: 634 - protein, 115 aa, Artificial Sequence; identical to SEQ ID NO: 449
  Synthetic polypeptide

SEQ ID NO: 635 - protein, 99 aa, Artificial Sequence; identical to SEQ ID NO: 450
  Synthetic polypeptide

SEQ ID NO: 636 - protein, 119 aa, Artificial Sequence; identical to SEQ ID NO: 451
  Synthetic polypeptide

SEQ ID NO: 637 - protein, 117 aa, Artificial Sequence; identical to SEQ ID NO: 452
  Synthetic polypeptide

SEQ ID NO: 638 - protein, 108 aa, Artificial Sequence; identical to SEQ ID NO: 453
  Synthetic polypeptide

SEQ ID NO: 639 - protein, 96 aa, Artificial Sequence
  Synthetic polypeptide
MAISKSTVVVVILCFILIQELGIYGEDPHMDAAKKIDCGGKCNSRCSKARRQKMCIRACNSCCKKCRCVPPGTSGNRDLCPCYARLTTHGGKLKCP

SEQ ID NO: 640 - protein, 90 aa, Artificial Sequence
  Synthetic polypeptide
MKLVFGTLLLCSLLLSFSFLEPVIAYEDSSYCSNKCADRCSSAGVKDRCVKYCGICCAECKCVPSGTYGNKHECPCYRDKLNKKGKPKCP

SEQ ID NO: 641 - protein, 90 aa, Artificial Sequence; identical to SEQ ID NO: 454
  Synthetic polypeptide

SEQ ID NO: 642 - protein, 88 aa, Artificial Sequence; identical to SEQ ID NO: 455
  Synthetic polypeptide

SEQ ID NO: 643 - protein, 88 aa, Artificial Sequence
  Synthetic polypeptide
MKVAFAAVLLICLVLSSSLFEVSMAGSAFCSSKCSKRCSRAGMKDRCMKFCGICCSKCNCVPSGTYGNKHECPCYRDMKNSKGKAKCP

SEQ ID NO: 644 - protein, 88 aa, Artificial Sequence
  Synthetic polypeptide
MKVAFVAVLLICLVLSSSLFEVSMAGSAFCSSKCAKRCSRAGMKDRCTRFCGICCSKCRCVPSGTYGNKHECPCYRDMKNSKGKPKCP

SEQ ID NO: 645 - protein, 64 aa, Artificial Sequence
  Synthetic polypeptide
LRPWECSPKCAGRCSNTQYKKACLTFCNKCCAKCLCVPPGTYGNKGACPCYNNWKTKEGGPKCP

SEQ ID NO: 646 - protein, 62 aa, Artificial Sequence
  Synthetic polypeptide
KDCVGACDARCSEHSHKKRCSRSCLTCCSACRCVPAGTAGNRETCGRCYTDWVSHNNMTKCP

SEQ ID NO: 647 - protein, 103 aa, Artificial Sequence; identical to SEQ ID NO: 457
  Synthetic polypeptide

SEQ ID NO: 648 - protein, 114 aa, Artificial Sequence; identical to SEQ ID NO: 458
  Synthetic polypeptide

SEQ ID NO: 649 - protein, 98 aa, Artificial Sequence; identical to SEQ ID NO: 459
  Synthetic polypeptide
  misc_feature (64)..(64): Xaa can be any naturally occurring amino acid

SEQ ID NO: 650 - protein, 107 aa, Artificial Sequence; identical to SEQ ID NO: 460
  Synthetic polypeptide

SEQ ID NO: 651 - protein, 98 aa, Artificial Sequence; identical to SEQ ID NO: 461
  Synthetic polypeptide

SEQ ID NO: 652 - protein, 94 aa, Artificial Sequence; identical to SEQ ID NO: 462
  Synthetic polypeptide

SEQ ID NO: 653 - protein, 145 aa, Artificial Sequence
  Synthetic polypeptide
MESKSPWSLRLLICCAAMVAIALLPQQGGQAACFVPTPGPAPAPPGSSATNTNASSAAPRPAKPSAFPPPMYGGVTPGTGSLQPHECGGRCAERCSATAYQKPCLFFCRKCCAACLCVPPGTYGNKNTCPCYNNWKTKRGGPKCP

SEQ ID NO: 654 - protein, 94 aa, Artificial Sequence; identical to SEQ ID NO: 465
  Synthetic polypeptide

SEQ ID NO: 655 - protein, 96 aa, Artificial Sequence; identical to SEQ ID NO: 466
  Synthetic polypeptide

SEQ ID NO: 656 - protein, 128 aa, Artificial Sequence; identical to SEQ ID NO: 467
  Synthetic polypeptide

SEQ ID NO: 657 - protein, 100 aa, Artificial Sequence; identical to SEQ ID NO: 468
  Synthetic polypeptide

SEQ ID NO: 658 - protein, 115 aa, Artificial Sequence; identical to SEQ ID NO: 469
  Synthetic polypeptide

SEQ ID NO: 659 - protein, 95 aa, Artificial Sequence; identical to SEQ ID NO: 470
  Synthetic polypeptide

SEQ ID NO: 660 - protein, 114 aa, Artificial Sequence; identical to SEQ ID NO: 471
  Synthetic polypeptide

SEQ ID NO: 661 - protein, 16 aa, Artificial Sequence
  Synthetic polypeptide
  misc_feature (16)..(16): Xaa can be any naturally occurring amino acid
KWKGIGAVLKVLTTGX

SEQ ID NO: 662 - protein, 26 aa, Artificial Sequence
  Synthetic polypeptide
  misc_feature (26)..(26): Xaa can be any naturally occurring amino acid
KWKLFKKIGIGAVLKVLTTGLPALIX

SEQ ID NO: 663 - protein, 11 aa, Artificial Sequence
  Synthetic polypeptide
RLCRVVIRVCR

SEQ ID NO: 664 - protein, 29 aa, Artificial Sequence
  Synthetic polypeptide
CYCRIPACIAGERRYGTCIYQGRLWAFCC

SEQ ID NO: 665 - protein, 38 aa, Artificial Sequence
  Synthetic polypeptide
MPRWRLFRRIDRVGKQIKQGILRAGPAIALVGDARAVG

SEQ ID NO: 666 - protein, 36 aa, Artificial Sequence
  Synthetic polypeptide
KWKVFKKIEKMGRNIRNGIVKAGPAIAVLGEAKALG

SEQ ID NO: 667 - protein, 37 aa, Artificial Sequence; identical to SEQ ID NO: 62
  Synthetic polypeptide

SEQ ID NO: 668 - protein, 22 aa, Artificial Sequence
  Synthetic polypeptide
GIGKFLKKAKKFGKAFVKILKK

SEQ ID NO: 669 - protein, 22 aa, Artificial Sequence
  Synthetic polypeptide
  misc_feature (22)..(22): Xaa can be any naturally occurring amino acid
GIGKFLKKAKKFGKAFVKILKX

SEQ ID NO: 670 - protein, 86 aa, Artificial Sequence
  Synthetic polypeptide
MNLAKGKEESLDSDLYAELRCMCIKTTSGIHPKNIQSLEVIGKGTHCNQVEVIATLKDGRKICLDPDAPRIKKIVQKKLAGDESAD

SEQ ID NO: 671 - protein, 93 aa, Artificial Sequence
  Synthetic polypeptide
MGHHHHHHHHHHSSGHIEGRHMYAELRCMCIKTTSGIHPKNIQSLEVIGKGTHCNQVEVIATLKDGRKICLDPDAPRIKKIVQKKLAGDESAI

SEQ ID NO: 672 - protein, 91 aa, Artificial Sequence
  Synthetic polypeptide
MGHHHHHHHHHHSSGHIEGRHMYLRCMCIKTTSGIHPKNIQSLEVIGKGTHCNQVEVIATLKDGRKICLDPDAPRIKKIVQKKLAGDESAD

SEQ ID NO: 673 - protein, 84 aa, Artificial Sequence
  Synthetic polypeptide
MNLAKGKEESLDSDLYAELRCMCIKTTSGIHPKNIQSLEVIGKGTHCNQVEVIATLKDGRKICLDPDAPRIKKIVQKKLAGDES

SEQ ID NO: 674 - protein, 69 aa, Artificial Sequence
  Synthetic polypeptide
MAELRCMCIKTTSGIHPKNIQSLEVIGKGTHCNQVEVIATLKDGRKICLDPDAPRIKKIVQKKLAGDES

SEQ ID NO: 675 - protein, 70 aa, Artificial Sequence
  Synthetic polypeptide
AELRCMCIKTTSGIHPKNIQSLEVIGKGTHCNQVEVIATLKDGRKICLDPDAPRIKKIVQKKLAGDESAD

SEQ ID NO: 676 - protein, 68 aa, Artificial Sequence
  Synthetic polypeptide
LRCMCIKTTSGIHPKNIQSLEVIGKGTHCNQVEVIATLKDGRKICLDPDAPRIKKIVQKKLAGDESAD

SEQ ID NO: 677 - protein, 83 aa, Artificial Sequence
  Synthetic polypeptide
NLAKGKEESLDSDLYAELRCMCIKTTSGIHPKNIQSLEVIGKGTHCNQVEVIATLKDGRKICLDPDAPRIKKIVQKKLAGDES

SEQ ID NO: 678 - protein, 5 aa, Artificial Sequence
  Synthetic polypeptide
AGDES

SEQ ID NO: 679 - protein, 5 aa, Artificial Sequence
  Synthetic polypeptide
YAELR

SEQ ID NO: 680 - protein, 68 aa, Artificial Sequence
  Synthetic polypeptide
AELRCMCIKTTSGIHPKNIQSLEVIGKGTHCNQVEVIATLKDGRKICLDPDAPRIKKIVQKKLAGDES

SEQ ID NO: 681 - protein, 4 aa, Artificial Sequence
  Synthetic polypeptide
AELR

SEQ ID NO: 682 - protein, 85 aa, Artificial Sequence
  Synthetic polypeptide
NLAKGKEESLDSDLYAELRCMCIKTTSGIHPKNIQSLEVIGKGTHCNQVEVIATLKDGRKICLDPDAPRIKKIVQKKLAGDESAD

SEQ ID NO: 683 - protein, 28 aa, Artificial Sequence
  Synthetic polypeptide
RVIEVVQGACRAIRHIPRRIRQGLERIL

SEQ ID NO: 684 - protein, 48 aa, Artificial Sequence
  Synthetic polypeptide
RVVRVVRRWVRRVRRVWRRVVRVVRRWVRRVRRVWRRVVRVVRRWVRR

SEQ ID NO: 685 - protein, 13 aa, Artificial Sequence
  Synthetic polypeptide
WRWWKVVWRWVKW

SEQ ID NO: 686 - protein, 12 aa, Artificial Sequence
  Synthetic polypeptide
WRWWKVWRWVKW

SEQ ID NO: 687 - protein, 12 aa, Artificial Sequence
  Synthetic polypeptide
ILRWPWWPWRRK

SEQ ID NO: 688 - protein, 12 aa, Artificial Sequence
  Synthetic polypeptide
RLARIVVIRVAR

SEQ ID NO: 689 - protein, 18 aa, Artificial Sequence
  Synthetic polypeptide
GKPRPYSPIPTSPRPIRY

SEQ ID NO: 690 - protein, 26 aa, Artificial Sequence
  Synthetic polypeptide
KWKLFIKKLTPAVKKVLLTGLPALIS

SEQ ID NO: 691 - protein, 26 aa, Artificial Sequence
  Synthetic polypeptide
KWKSFIKKLTSAAKKVLTTGLPALIS

SEQ ID NO: 692 - protein, 28 aa, Artificial Sequence
  Synthetic polypeptide
KWKLFKKIGIGAVLKVLTTGLPALKLTK

SEQ ID NO: 693 - protein, 20 aa, Artificial Sequence
  Synthetic polypeptide
KKWWRRALQALKNGLPALIS

SEQ ID NO: 694 - protein, 13 aa, Artificial Sequence
  Synthetic polypeptide
WRWWKVAWRWVKW

SEQ ID NO: 695 - protein, 13 aa, Artificial Sequence
  Synthetic polypeptide
WRWWKPKWRWPKW

SEQ ID NO: 696 - protein, 13 aa, Artificial Sequence
  Synthetic polypeptide
RRIWKPKWRLPKR

SEQ ID NO: 697 - protein, 12 aa, Artificial Sequence
  Synthetic polypeptide
ILRWPWWPWRRA

SEQ ID NO: 698 - protein, 12 aa, Artificial Sequence
  Synthetic polypeptide
ILRWPWWPWRAK

SEQ ID NO: 699 - protein, 12 aa, Artificial Sequence
  Synthetic polypeptide
ILRWPWWPWARK

SEQ ID NO: 700 - protein, 12 aa, Artificial Sequence
  Synthetic polypeptide
ILRWPWWPARRK

SEQ ID NO: 701 - protein, 12 aa, Artificial Sequence
  Synthetic polypeptide
ILRWPWWAWRRK

SEQ ID NO: 702 - protein, 12 aa, Artificial Sequence
  Synthetic polypeptide
ILRWPWAPWRRK

SEQ ID NO: 703 - protein, 12 aa, Artificial Sequence
  Synthetic polypeptide
ILRWPAWPWRRK

SEQ ID NO: 704 - protein, 12 aa, Artificial Sequence
  Synthetic polypeptide
ILRWAWWPWRRK

SEQ ID NO: 705 - protein, 12 aa, Artificial Sequence
  Synthetic polypeptide
ILRAPWWPWRRK

SEQ ID NO: 706 - protein, 12 aa, Artificial Sequence
  Synthetic polypeptide
ILAWPWWPWRRK

SEQ ID NO: 707 - protein, 12 aa, Artificial Sequence
  Synthetic polypeptide
IARWPWWPWRRK

SEQ ID NO: 708 - protein, 12 aa, Artificial Sequence
  Synthetic polypeptide
ALRWPWWPWRRK

SEQ ID NO: 709 - protein, 9 aa, Artificial Sequence
  Synthetic polypeptide
RWWWPWRRK

SEQ ID NO: 710 - protein, 9 aa, Artificial Sequence
  Synthetic polypeptide
WPWWPWRRK

SEQ ID NO: 711 - protein, 8 aa, Artificial Sequence
  Synthetic polypeptide
LRWPWWPW

SEQ ID NO: 712 - protein, 10 aa, Artificial Sequence
  Synthetic polypeptide
LRWWWPWRRK

SEQ ID NO: 713 - protein, 10 aa, Artificial Sequence
  Synthetic polypeptide
LWPWWPWRRK

SEQ ID NO: 714 - protein, 11 aa, Artificial Sequence
  Synthetic polypeptide
ILKKWPWWPWR

SEQ ID NO: 715 - protein, 11 aa, Artificial Sequence
  Synthetic polypeptide
ILKKWPWWPWK

SEQ ID NO: 716 - protein, 12 aa, Artificial Sequence
  Synthetic polypeptide
ILKKWPWWPWRR

SEQ ID NO: 717 - protein, 12 aa, Artificial Sequence
  Synthetic polypeptide
ILKKWPWWPRRK

SEQ ID NO: 718 - protein, 12 aa, Artificial Sequence
  Synthetic polypeptide
ILKKWPWWWRRK

SEQ ID NO: 719 - protein, 12 aa, Artificial Sequence
  Synthetic polypeptide
ILKKWWWPWRRK

SEQ ID NO: 720 - protein, 12 aa, Artificial Sequence
  Synthetic polypeptide
ILKKPWWPWRRK

SEQ ID NO: 721 - protein, 12 aa, Artificial Sequence
  Synthetic polypeptide
IKKWPWWPWRRK

SEQ ID NO: 722 - protein, 10 aa, Artificial Sequence
  Synthetic polypeptide
WVRLWWRRVW

SEQ ID NO: 723 - protein, 10 aa, Artificial Sequence
  Synthetic polypeptide
RLWVWWVWRR

SEQ ID NO: 724 - protein, 10 aa, Artificial Sequence
  Synthetic polypeptide
RLVVWVVWRR

SEQ ID NO: 725 - protein, 10 aa, Artificial Sequence
  Synthetic polypeptide
RLFVWWVFRR

SEQ ID NO: 726 - protein, 10 aa, Artificial Sequence
  Synthetic polypeptide
RLVVWWVVRR

SEQ ID NO: 727 - protein, 10 aa, Artificial Sequence
  Synthetic polypeptide
RLWWVVWWRR

SEQ ID NO: 728 - protein, 13 aa, Artificial Sequence
  Synthetic polypeptide
RLGGGWVWWVWRR

SEQ ID NO: 729 - protein, 11 aa, Artificial Sequence
  Synthetic polypeptide
RLWVWWVWRRK

SEQ ID NO: 730 - protein, 14 aa, Artificial Sequence
  Synthetic polypeptide
ILRWWVWWVWWRRK

SEQ ID NO: 731 - protein, 13 aa, Artificial Sequence
  Synthetic polypeptide
ILRRWVWWVWRRK

SEQ ID NO: 732 - protein, 12 aa, Artificial Sequence
  Synthetic polypeptide
KRRWVWWVWRLI

SEQ ID NO: 733 - protein, 12 aa, Artificial Sequence
  Synthetic polypeptide
ILRWVWWVWRRK

SEQ ID NO: 734 - protein, 13 aa, Artificial Sequence
  Synthetic polypeptide
ILKKWVWWPWRRK

SEQ ID NO: 735 - protein, 13 aa, Artificial Sequence
  Synthetic polypeptide
ILKKWPWWVWRRK

SEQ ID NO: 736 - protein, 13 aa, Artificial Sequence
  Synthetic polypeptide
ILKKWVWWVWRRK

SEQ ID NO: 737 - protein, 13 aa, Artificial Sequence
  Synthetic polypeptide
ILKKWPWWPWRRK

SEQ ID NO: 738 - protein, 12 aa, Artificial Sequence
  Synthetic polypeptide
CLRWPWWPWRRK

SEQ ID NO: 739 - protein, 13 aa, Artificial Sequence
  Synthetic polypeptide
WRIWKPKWRLPKW

SEQ ID NO: 740 - protein, 11 aa, Artificial Sequence
  Synthetic polypeptide
ILKKWPWWWRK

SEQ ID NO: 741 - protein, 11 aa, Artificial Sequence
  Synthetic polypeptide
ILKKWWWPWRK

SEQ ID NO: 742 - protein, 14 aa, Artificial Sequence
  Synthetic polypeptide
ILKKWPWWPWRRIM

SEQ ID NO: 743 - protein, 14 aa, Artificial Sequence
  Synthetic polypeptide
ILKKWPWWPWRRKM

SEQ ID NO: 744 - protein, 7 aa, Artificial Sequence
  Synthetic polypeptide
ILKKWPW

SEQ ID NO: 745 - protein, 7 aa, Artificial Sequence
  Synthetic polypeptide
WWPWRRK

SEQ ID NO: 746 - protein, 21 aa, Artificial Sequence
  Synthetic polypeptide
ILKKWPWWPWRRIMILKKAGS

SEQ ID NO: 747 - protein, 20 aa, Artificial Sequence
  Synthetic polypeptide
ILKKWPWWPWRRMILKKAGS

SEQ ID NO: 748 - protein, 21 aa, Artificial Sequence
  Synthetic polypeptide
ILKKWPWWPWRRKMILKKAGS

SEQ ID NO: 749 - protein, 8 aa, Artificial Sequence
  Synthetic polypeptide
PWWPWRRK

SEQ ID NO: 750 - protein, 12 aa, Artificial Sequence
  Synthetic polypeptide
LKKWPWWPWRRK

SEQ ID NO: 751 - protein, 13 aa, Artificial Sequence
  Synthetic polypeptide
WWKKWPWWPWRRK

SEQ ID NO: 752 - protein, 13 aa, Artificial Sequence
  Synthetic polypeptide
ILKKWPWWAWRRK

SEQ ID NO: 753 - protein, 13 aa, Artificial Sequence
  Synthetic polypeptide
ILKKWAWWPWRRK

SEQ ID NO: 754 - protein, 12 aa, Artificial Sequence
  Synthetic polypeptide
ILKWVWWVWRRK

SEQ ID NO: 755 - protein, 12 aa, Artificial Sequence
  Synthetic polypeptide
KRKWPWWPWRLI

SEQ ID NO: 756 - protein, 28 aa, Artificial Sequence
  Synthetic polypeptide
ILRWPWWPWRRKILMRWPWWPWRRKMAA

SEQ ID NO: 757 - protein, 14 aa, Artificial Sequence
  Synthetic polypeptide
ILRWPWRRWPWRRK

SEQ ID NO: 758 - protein, 21 aa, Artificial Sequence
  Synthetic polypeptide
ILRWPWWPWRRKDMILKKAGS

SEQ ID NO: 759 - protein, 20 aa, Artificial Sequence
  Synthetic polypeptide
ILRWPWWPWRRKMILKKAGS

SEQ ID NO: 760 - protein, 21 aa, Artificial Sequence
  Synthetic polypeptide
ILRWPWWPWRRKIMILKKAGS

SEQ ID NO: 761 - protein, 13 aa, Artificial Sequence
  Synthetic polypeptide
ILKKWPWWPWKKK

SEQ ID NO: 762 - protein, 13 aa, Artificial Sequence
  Synthetic polypeptide
ILRRWPWWPWRRR

SEQ ID NO: 763 - protein, 11 aa, Artificial Sequence
  Synthetic polypeptide
ILWPWWPWRRK

SEQ ID NO: 764 - protein, 12 aa, Artificial Sequence
  Synthetic polypeptide
KRRWPWWPWRLI

SEQ ID NO: 765 - protein, 11 aa, Artificial Sequence
  Synthetic polypeptide
ILKWPWWPWRK

SEQ ID NO: 766 - protein, 12 aa, Artificial Sequence
  Synthetic polypeptide
ILKKWPWWPWRK

SEQ ID NO: 767 - protein, 12 aa, Artificial Sequence
  Synthetic polypeptide
ILKWPWWPWRRK

SEQ ID NO: 768 - protein, 12 aa, Artificial Sequence
  Synthetic polypeptide
ILRRWPWWPWRK

SEQ ID NO: 769 - protein, 13 aa, Artificial Sequence
  Synthetic polypeptide
ILRRWPWWPWRRK

SEQ ID NO: 770 - protein, 12 aa, Artificial Sequence
  Synthetic polypeptide
WWRWPWWPWRRK

SEQ ID NO: 771 - protein, 15 aa, Artificial Sequence
  Synthetic polypeptide
ILRWPWWPWWPWRRK

SEQ ID NO: 772 - protein, 12 aa, Artificial Sequence
  Synthetic polypeptide
ILRYVYYVYRRK

SEQ ID NO: 773 - protein, 13 aa, Artificial Sequence
  Synthetic polypeptide
ILKKFPFWPWRRK

SEQ ID NO: 774 - protein, 13 aa, Artificial Sequence
  Synthetic polypeptide
ILKKFPWFPWRRK

SEQ ID NO: 775 - protein, 13 aa, Artificial Sequence
  Synthetic polypeptide
ILKKYPWYPWRRK

SEQ ID NO: 776 - protein, 12 aa, Artificial Sequence
  Synthetic polypeptide
ILKKWPWPWRRK

SEQ ID NO: 777 - protein, 13 aa, Artificial Sequence
  Synthetic polypeptide
ILKKYPYYPYRRK

SEQ ID NO: 778 - protein, 13 aa, Artificial Sequence
  Synthetic polypeptide
ILKKIPIIPIRRK

SEQ ID NO: 779 - protein, 13 aa, Artificial Sequence
  Synthetic polypeptide
ILKKFPFFPFRRK

SEQ ID NO: 780 - protein, 13 aa, Artificial Sequence
  Synthetic polypeptide
KRRWPWWPWKKLI

SEQ ID NO: 781 - protein, 25 aa, Artificial Sequence
  Synthetic polypeptide
KKAAAKAAAAAKAAWAAKAAAKKKK

SEQ ID NO: 782 - protein, 36 aa, Artificial Sequence
  Synthetic polypeptide
DPVTCLKSGAICHPVFCPRRYKQIGTCGLPGTKCCK

SEQ ID NO: 783 - protein, 33 aa, Artificial Sequence
  Synthetic polypeptide
ALWKTMLKKLGTMALHAGKAALGAAADTISQTQ

SEQ ID NO: 784 - protein, 29 aa, Artificial Sequence
  Synthetic polypeptide
SIGSAFKKAAHVGKHVGKAALGAAARRRK

SEQ ID NO: 785 - protein, 30 aa, Artificial Sequence
  Synthetic polypeptide
ALWKTMLKKAAHVGKHVGKAALGAAARRRK

SEQ ID NO: 786 - protein, 29 aa, Artificial Sequence
  Synthetic polypeptide
GWGSFFKKAAHVGKHVGKAALGAAARRRK

SEQ ID NO: 787 - protein, 25 aa, Artificial Sequence
  Synthetic polypeptide
SIGSAFKKAAHVGKHVGKAALTHYL

SEQ ID NO: 788 - protein, 26 aa, Artificial Sequence
  Synthetic polypeptide
ALWKTMLKKAAHVGKHVGKAALTHYL

SEQ ID NO: 789 - protein, 26 aa, Artificial Sequence
  Synthetic polypeptide
KGWGSFFKKAAHVGKHVGKAALTHYL

SEQ ID NO: 790 - protein, 23 aa, Artificial Sequence
  Synthetic polypeptide
KKWKKFIKKIGIGAVLTTPGAKK

SEQ ID NO: 791 - protein, 30 aa, Artificial Sequence
  Synthetic polypeptide
KWKKFIKKIGIGAVLKVLTTGLPALKLTKK

SEQ ID NO: 792 - protein, 25 aa, Artificial Sequence
  Synthetic polypeptide
KWKSFIKKLTSAAKKVTTAAKPLTK

SEQ ID NO: 793 - protein, 33 aa, Artificial Sequence
  Synthetic polypeptide
KLWKLFKKIGIGAVLKVLKVLTTGLPALKLTLK

SEQ ID NO: 794 - protein, 31 aa, Artificial Sequence
  Synthetic polypeptide
KWKFKKIGIGAVLKVLKVLTTGLPALKLTLK

SEQ ID NO: 795 - protein, 30 aa, Artificial Sequence
  Synthetic polypeptide
KLFKKIGIGAVLKVLKVLTTGLPALKLTLK

SEQ ID NO: 796 - protein, 32 aa, Artificial Sequence
  Synthetic polypeptide
KWKLFKKIGIGAVLKVLKVLTTGLPALKLTLK

SEQ ID NO: 797 - protein, 27 aa, Artificial Sequence
  Synthetic polypeptide
KWKKFIKSLTKSAAKTVVKTAKKPLIV

SEQ ID NO: 798 - protein, 26 aa, Artificial Sequence
  Synthetic polypeptide
KWKSFIKKLTKAAKKVVTTAKKPLIV

SEQ ID NO: 799 - protein, 27 aa, Artificial Sequence
  Synthetic polypeptide
KWKSFIKKLTSAAKKVVTTAKPLALIS

SEQ ID NO: 800 - protein, 4 aa, Artificial Sequence
  Synthetic polypeptide
HIFR

SEQ ID NO: 801 - protein, 44 aa, Artificial Sequence
  Synthetic polypeptide
  misc_feature (20)..(20): Xaa can be any naturally occurring amino acid
FFRHLFRGAKAIFRGARQGXRAHKVVSRYRNRDVPETDNNQEEP

SEQ ID NO: 802 - protein, 22 aa, Artificial Sequence
  Synthetic polypeptide
FFHHIFRGIVHVGKTIHRLVTG

SEQ ID NO: 803 - protein, 22 aa, Artificial Sequence
  Synthetic polypeptide
FIHHIFRGIVHAGRSIGRFLTG

SEQ ID NO: 804 - protein, 19 aa, Artificial Sequence
  Synthetic polypeptide
  misc_feature (12)..(12): Xaa can be any naturally occurring amino acid
RRWCFRVCYRGXFCYRKCR

SEQ ID NO: 805 - protein, 18 aa, Artificial Sequence
  Synthetic polypeptide
  misc_feature (5)..(5): Xaa can be any naturally occurring amino acid
  misc_feature (10)..(10): Xaa can be any naturally occurring amino acid
RRWCXRVCYXGFCYRKCR

SEQ ID NO: 806 - protein, 18 aa, Artificial Sequence
  Synthetic polypeptide
  misc_feature (2)..(2): Xaa can be any naturally occurring amino acid
  misc_feature (5)..(7): Xaa can be any naturally occurring amino acid
  misc_feature (14)..(16): Xaa can be any naturally occurring amino acid
RXWCXXXCYRGFCXXXCR

SEQ ID NO: 807 - protein, 19 aa, Artificial Sequence
  Synthetic polypeptide
  misc_feature (6)..(6): Xaa can be any naturally occurring amino acid
  misc_feature (9)..(9): Xaa can be any naturally occurring amino acid
  misc_feature (12)..(12): Xaa can be any naturally occurring amino acid
  misc_feature (15)..(16): Xaa can be any naturally occurring amino acid
  misc_feature (19)..(19): Xaa can be any naturally occurring amino acid
RRWCFXVCXRGXCYXXCRX

SEQ ID NO: 808 - protein, 18 aa, Artificial Sequence
  Synthetic polypeptide
  misc_feature (1)..(1): Xaa can be any naturally occurring amino acid
  misc_feature (10)..(10): Xaa can be any naturally occurring amino acid
  misc_feature (12)..(12): Xaa can be any naturally occurring amino acid
  misc_feature (14)..(16): Xaa can be any naturally occurring amino acid
XRWCFRVCYXGXCXXXCR

SEQ ID NO: 809 - protein, 17 aa, Artificial Sequence
  Synthetic polypeptide
  misc_feature (4)..(4): Xaa can be any naturally occurring amino acid
  misc_feature (7)..(7): Xaa can be any naturally occurring amino acid
  misc_feature (10)..(10): Xaa can be any naturally occurring amino acid
  misc_feature (13)..(13): Xaa can be any naturally occurring amino acid
WCFXVCXRGXCRXKCRR

SEQ ID NO: 810 - protein, 19 aa, Artificial Sequence
  Synthetic polypeptide
RRWCFRVCYRGRFCYRKCR

SEQ ID NO: 811 - protein, 18 aa, Artificial Sequence
  Synthetic polypeptide
RRWCRRVCYAGFCYRKCR

SEQ ID NO: 812 - protein, 18 aa, Artificial Sequence
  Synthetic polypeptide
RVWCRYRCYRGFCRRFCR

SEQ ID NO: 813 - protein, 18 aa, Artificial Sequence
  Synthetic polypeptide
RVWCRRRCYRGFCRYFCR

SEQ ID NO: 814 - protein, 19 aa, Artificial Sequence
  Synthetic polypeptide
RRWCFIVCRRGRCYVACRR

SEQ ID NO: 815 - protein, 18 aa, Artificial Sequence
  Synthetic polypeptide
RRWCFIVCRRGACYRRCR

SEQ ID NO: 816 - protein, 18 aa, Artificial Sequence
  Synthetic polypeptide
RRWCFRVCYRGFCRYFCR

SEQ ID NO: 817 - protein, 18 aa, Artificial Sequence
  Synthetic polypeptide
RRWCFRVCYKGFCRYKCR

SEQ ID NO: 818 - protein, 18 aa, Artificial Sequence
  Synthetic polypeptide
FRWCFRVCYKGRCRYKCR

SEQ ID NO: 819 - protein, 17 aa, Artificial Sequence
  Synthetic polypeptide
WCFAVCYRGRCRRKCRR

SEQ ID NO: 820 - protein, 17 aa, Artificial Sequence
  Synthetic polypeptide
WCFAVCRRGRCRYKCRR

SEQ ID NO: 821 - protein, 14 aa, Artificial Sequence
  Synthetic polypeptide
ALYKKKIIKKLLES

SEQ ID NO: 822 - protein, 14 aa, Artificial Sequence
  Synthetic polypeptide
  misc_feature (7)..(7): Xaa can be any naturally occurring amino acid
YAERLCXCSIKAEV

SEQ ID NO: 823 - protein, 15 aa, Artificial Sequence
  Synthetic polypeptide
ANLIATKKNGRKLCL

SEQ ID NO: 824 - protein, 18 aa, Artificial Sequence
  Synthetic polypeptide
KFDKSKLKKTETQEKNPL

SEQ ID NO: 825 - protein, 13 aa, Artificial Sequence
  Synthetic polypeptide
EGVNDNEEGFFSA

SEQ ID NO: 826 - protein, 20 aa, Artificial Sequence
  Synthetic polypeptide
ADSGEGDFLAEGGGVRKLIK

SEQ ID NO: 827 - protein, 16 aa, Artificial Sequence
  Synthetic polypeptide
ADSGEGDFLAEGGGVR

SEQ ID NO: 828 - protein, 12 aa, Artificial Sequence
  Synthetic polypeptide
SWVQEYVYDLEL

SEQ ID NO: 829 - protein, 20 aa, Artificial Sequence
  Synthetic polypeptide
EWVQKYVSDLELSAWKKILK

SEQ ID NO: 830 - protein, 19 aa, Artificial Sequence
  Synthetic polypeptide
KWVREYINSLEMSKKGLAG

SEQ ID NO: 831 - protein, 13 aa, Artificial Sequence
  Synthetic polypeptide
PRIKKIVQKKLAG

SEQ ID NO: 832 - protein, 11 aa, Artificial Sequence
  Synthetic polypeptide
KWKWWWWWKWK

SEQ ID NO: 833 - protein, 11 aa, Artificial Sequence
  Synthetic polypeptide
KGYFYFLFKFK

SEQ ID NO: 834 - protein, 11 aa, Artificial Sequence
  Synthetic polypeptide
KFKHYFFWKYK

SEQ ID NO: 835 - protein, 14 aa, Artificial Sequence
  Synthetic polypeptide
YAERLCTCSIKAEV

SEQ ID NO: 836 - protein, 20 aa, Artificial Sequence
  Synthetic polypeptide
SAIHPSSILKLEVICIGVLQ

SEQ ID NO: 837 - protein, 8 aa, Artificial Sequence
  Synthetic polypeptide
RFEKSKIK

SEQ ID NO: 838 - protein, 17 aa, Artificial Sequence
  Synthetic polypeptide
ATKKNGRKLCLDLQAAL

SEQ ID NO: 839 - protein, 13 aa, Artificial Sequence
  Synthetic polypeptide
ALYKRLFKKLKKF

SEQ ID NO: 840 - protein, 13 aa, Artificial Sequence
  Synthetic polypeptide
GLYKRLFKKLLKS

SEQ ID NO: 841 - protein, 13 aa, Artificial Sequence
  Synthetic polypeptide
ALYKKLFKKLLKR

SEQ ID NO: 842 - protein, 18 aa, Artificial Sequence
  Synthetic polypeptide
KLYKKWKNKLKRSLKRLG

SEQ ID NO: 843 - protein, 13 aa, Artificial Sequence
  Synthetic polypeptide
ALYKKWKNKLLKS

SEQ ID NO: 844 - protein, 14 aa, Artificial Sequence
  Synthetic polypeptide
KLYKKWKKKLLKLK

SEQ ID NO: 845 - protein, 13 aa, Artificial Sequence
  Synthetic polypeptide
ARYRKFRNKILRS

SEQ ID NO: 846 - protein, 13 aa, Artificial Sequence
  Synthetic polypeptide
ARYRKFKNKILKS

SEQ ID NO: 847 - protein, 14 aa, Artificial Sequence
  Synthetic polypeptide
KLYRKFKNKLLKLK

SEQ ID NO: 848 - protein, 13 aa, Artificial Sequence
  Synthetic polypeptide
ARYKKFKKKLLKS

SEQ ID NO: 849 - protein, 18 aa, Artificial Sequence
  Synthetic polypeptide
ALYKKFKKKLLKSLKRLG

SEQ ID NO: 850 - protein, 74 aa, Artificial Sequence
  Synthetic polypeptide
SDDPKESEGDLHCVCVKTTSLVRPGHITNLELIKAGGHCPTANLIATKKNGRKLCLDLQAALYKKKIIKKLLES

SEQ ID NO: 851 - protein, 74 aa, Artificial Sequence
  Synthetic polypeptide
SDDPKESEGDLHCVCVKTTSLVRPRHITNLELIKAGGHCPTANLIATKKNGRKLCLDLQAALYKKKIIKKLLES

SEQ ID NO: 852 - protein, 20 aa, Artificial Sequence
  Synthetic polypeptide
RHFCGGALIHARYVMTAASS

SEQ ID NO: 853 - protein, 20 aa, Artificial Sequence
  Synthetic polypeptide
RHYCGGALIHARFVMTAASS

SEQ ID NO: 854 - protein, 20 aa, Artificial Sequence
  Synthetic polypeptide
RHFCGGALIHARFAMTAASS

SEQ ID NO: 855 - protein, 20 aa, Artificial Sequence
  Synthetic polypeptide
RHFCGGALIHARFIMTAASS

SEQ ID NO: 856 - protein, 20 aa, Artificial Sequence
  Synthetic polypeptide
RHFCGGALIHARFLMTAASS

SEQ ID NO: 857 - protein, 20 aa, Artificial Sequence
  Synthetic polypeptide
RHFCAAALIHARFVMTAASS

SEQ ID NO: 858 - protein, 20 aa, Artificial Sequence
  Synthetic polypeptide
RHFCGAALIHARFVMTAASS

SEQ ID NO: 859 - protein, 20 aa, Artificial Sequence
  Synthetic polypeptide
RHFCAGALIHARFVMTAASS

SEQ ID NO: 860 - protein, 20 aa, Artificial Sequence
  Synthetic polypeptide
RHFSGGALIHARYVMTAASC

SEQ ID NO: 861 - protein, 20 aa, Artificial Sequence
  Synthetic polypeptide
RHYSGGALIHARFVMTAASC

SEQ ID NO: 862 - protein, 20 aa, Artificial Sequence
  Synthetic polypeptide
RHFSGGALIHARFAMTAASC

SEQ ID NO: 863 - protein, 20 aa, Artificial Sequence
  Synthetic polypeptide
RHFSGGALIHARFIMTAASC

SEQ ID NO: 864 - protein, 20 aa, Artificial Sequence
  Synthetic polypeptide
RHFSGGALIHARFLMTAASC

SEQ ID NO: 865 - protein, 20 aa, Artificial Sequence
  Synthetic polypeptide
RHFSAAALIHARFVMTAASC

SEQ ID NO: 866 - protein, 20 aa, Artificial Sequence
  Synthetic polypeptide
RHFSGAALIHARFVMTAASC

SEQ ID NO: 867 - protein, 20 aa, Artificial Sequence
  Synthetic polypeptide
RHFSAGALIHARFVMTAASC

SEQ ID NO: 868 - protein, 25 aa, Artificial Sequence
  Synthetic polypeptide
NQGRHFCGGALIHARFVMTAASCYQ

SEQ ID NO: 869 - protein, 25 aa, Artificial Sequence
  Synthetic polypeptide
NQGRHYCGGALIHARFVMTAASCFQ

SEQ ID NO: 870 - protein, 25 aa, Artificial Sequence
  Synthetic polypeptide
NQGRHFCGGALIHARFAMTAASCFQ

SEQ ID NO: 871 - protein, 25 aa, Artificial Sequence
  Synthetic polypeptide
NQGRHFCGGALIHARFIMTAASCFQ

SEQ ID NO: 872 - protein, 25 aa, Artificial Sequence
  Synthetic polypeptide
NQGRHFCGGALIHARFLMTAASCFQ

SEQ ID NO: 873 - protein, 25 aa, Artificial Sequence
  Synthetic polypeptide
NQGRHFCGGALIHARFVMTAATCFQ

SEQ ID NO: 874 - protein, 25 aa, Artificial Sequence
  Synthetic polypeptide
NQGRHFCAAALIHARFVMTAASSFQ

SEQ ID NO: 875 - protein, 25 aa, Artificial Sequence
  Synthetic polypeptide
NQGRHFCGAALIHARFVMTAASSFQ

SEQ ID NO: 876 - protein, 25 aa, Artificial Sequence
  Synthetic polypeptide
NQGRHFCAGALIHARFVMTAASSFQ

SEQ ID NO: 877 - protein, 25 aa, Artificial Sequence
  Synthetic polypeptide
NQGRHFSAAALIHARFVMTAASCFQ

SEQ ID NO: 878 - protein, 25 aa, Artificial Sequence
  Synthetic polypeptide
NQGRHFSGAALIHARFVMTAASCFQ

SEQ ID NO: 879 - protein, 25 aa, Artificial Sequence
  Synthetic polypeptide
NQGRHFSAGALIHARFVMTAASCFQ

SEQ ID NO: 880 - protein, 25 aa, Artificial Sequence
  Synthetic polypeptide
NQGRHFCAAALIHARFVMTAASCFQ

SEQ ID NO: 881 - protein, 25 aa, Artificial Sequence
  Synthetic polypeptide
NQGRHFCGAALIHARFVMTAASCFQ

SEQ ID NO: 882 - protein, 25 aa, Artificial Sequence
  Synthetic polypeptide
NQGRHFCAGALIHARFVMTAASCFQ

SEQ ID NO: 883 - protein, 20 aa, Artificial Sequence
  Synthetic polypeptide
RHFCGGALIHARFVMTAAKS

SEQ ID NO: 884 - protein, 20 aa, Artificial Sequence
  Synthetic polypeptide
RHFCGGALIHARFVMTAARS

SEQ ID NO: 885 - protein, 20 aa, Artificial Sequence
  Synthetic polypeptide
RHFCGGALIHARFVMTAAHS

SEQ ID NO: 886 - protein, 20 aa, Artificial Sequence
  Synthetic polypeptide
RHFSGGALIHARFVMTAAKC

SEQ ID NO: 887 - protein, 20 aa, Artificial Sequence
  Synthetic polypeptide
RHFSGGALIHARFVMTAARC

SEQ ID NO: 888 - protein, 20 aa, Artificial Sequence
  Synthetic polypeptide
RHFSGGALIHARFVMTAAHC

SEQ ID NO: 889 - protein, 25 aa, Artificial Sequence
  Synthetic polypeptide
NQGRHFCGGALIHARFVMTAAKSFQ

SEQ ID NO: 890 - protein, 25 aa, Artificial Sequence
  Synthetic polypeptide
NQGRHFCGGALIHARFVMTAARSFQ

SEQ ID NO: 891 - protein, 25 aa, Artificial Sequence
  Synthetic polypeptide
NQGRHFCGGALIHARFVMTAAHSFQ

SEQ ID NO: 892 - protein, 25 aa, Artificial Sequence
  Synthetic polypeptide
NQGRHFSGGALIHARFVMTAAKCFQ

SEQ ID NO: 893 - protein, 25 aa, Artificial Sequence
  Synthetic polypeptide
NQGRHFSGGALIHARFVMTAARCFQ

SEQ ID NO: 894 - protein, 25 aa, Artificial Sequence
  Synthetic polypeptide
NQGRHFSGGALIHARFVMTAAHCFQ

SEQ ID NO: 895 - protein, 20 aa, Artificial Sequence
  Synthetic polypeptide
RHFCGGALIHARFVMTAAKC

SEQ ID NO: 896 - protein, 20 aa, Artificial Sequence
  Synthetic polypeptide
RHFCGGALIHARFVMTAARC

SEQ ID NO: 897 - protein, 20 aa, Artificial Sequence
  Synthetic polypeptide
RHFCGGALIHARFVMTAAHC

SEQ ID NO: 898 - protein, 25 aa, Artificial Sequence
  Synthetic polypeptide
NQGRHFCGGALIHARFVMTAAKCFQ

SEQ ID NO: 899 - protein, 25 aa, Artificial Sequence
  Synthetic polypeptide
NQGRHFCGGALIHARFVMTAARCFQ

SEQ ID NO: 900 - protein, 20 aa, Artificial Sequence
  Synthetic polypeptide
RHFSGGALIHARFVMTAASS

SEQ ID NO: 901 - protein, 25 aa, Artificial Sequence
  Synthetic polypeptide
NQGRHFSGGALIHARFVMTAASSFQ

SEQ ID NO: 902 - protein, 20 aa, Artificial Sequence
  Synthetic polypeptide
RHFCGGALIHARFVMTAASS

SEQ ID NO: 903 - protein, 25 aa, Artificial Sequence
  Synthetic polypeptide
NQGRHFCGGALIHARFVMTAASSFQ

SEQ ID NO: 904 - protein, 20 aa, Artificial Sequence
  Synthetic polypeptide
RHFSGGALIHARFVMTAASC

SEQ ID NO: 905 - protein, 25 aa, Artificial Sequence
  Synthetic polypeptide
NQGRHFSGGALIHARFVMTAASCFQ

SEQ ID NO: 906 - protein, 20 aa, Artificial Sequence
  Synthetic polypeptide
RHFCGGALIHARFVMTAASC

SEQ ID NO: 907 - protein, 25 aa, Artificial Sequence
  Synthetic polypeptide
NQGRHFCGGALIHARFVMTAASCFQ

SEQ ID NO: 908 - protein, 68 aa, Artificial Sequence
  Synthetic polypeptide
MRTSYLLLFTLCLLLSEMASGGNFLTGLGHRSDHYNCVSSGGQCLYSACPIFTKIQGTCYRGKAKCCK

SEQ ID NO: 909 - protein, 12 aa, Artificial Sequence
  Synthetic polypeptide
YQVIQSWEHWRE

SEQ ID NO: 910 - protein, 13 aa, Artificial Sequence
  Synthetic polypeptide
YKIIQQWFHWRRV

SEQ ID NO: 911 - protein, 140 aa, Artificial Sequence
  Synthetic polypeptide
MKFACALLALLGLATSCSFIVFRSEWRALPSECSSRLGHPVRYVVISHTRGSFCNSFDSCEQQARNVQHYHKNELEWCDVAYNIKEDHTEPIYNPMSIGITFMGNFMDRVRKAALRAALNLLESGVSRGFLRSNYEVKGH

SEQ ID NO: 912 - protein, 190 aa, Artificial Sequence
  Synthetic polypeptide
MSRRYTPLAWVLLALLGLGAAQDCGSIVSRGKWGALASKCSQRLRQPVRYVVVSHTAGSVCNTPASCQRQAQNVQYYHVRERGWCDVGYNFKIGEDGKVYEGRGWNTKGDHSGPTWNPIAIGISFMGNYMHRVFFASALRAAQSLLACGAARGYLTPNYEVKGHRDVQQTLSPGDELYKIIQQWPHYRRV

SEQ ID NO: 913 - protein, 36 aa, Artificial Sequence
  Synthetic polypeptide
NHRSCYRNKGVCAPARCPRNMRQIGTCHGPPVKCCR

SEQ ID NO: 914 - protein, 36 aa, Artificial Sequence
  Synthetic polypeptide
SRRSCHRNKGVCALTRCPRNMRQIGTCFGPPVKCCR

SEQ ID NO: 915 - protein, 64 aa, Artificial Sequence
  Synthetic polypeptide
MRVLYLLFSFLFIFLMPLPGVFGGIGDPVTCLKSGAICHPVFCPRRYKQIGTCGLPGTKCCKKP

SEQ ID NO: 916 - protein, 64 aa, Artificial Sequence
  Synthetic polypeptide
MRVLYLLFSFLFIFLMPLPGVFGGISDPVTCLKSGAICHPVFCPRRYKQIGTCGLPGTKCCKKP

SEQ ID NO: 917 - protein, 64 aa, Artificial Sequence
  Synthetic polypeptide
MRLHHLLLALLFLVLSAGSGFTQGVRNSQSCRRNKGICVPIRCPGSMRQIGTCLGAQVKCCRRK

SEQ ID NO: 918 - protein, 81 aa, Artificial Sequence
  Synthetic polypeptide
MRLVVCLVFLASFALVCQGQVYKGGYTRPIPRPPFVRPVPGGPIGPYNGCPVSCRGISFSQARSCCSRLGRCCHVGKGYSG

SEQ ID NO: 919 - protein, 82 aa, Artificial Sequence
  Synthetic polypeptide
MRLVVCLVFLASFALVCQGQVYKGGYTRPVPRPPPFVRPLPGGPIGPYNGCPVSCRGISFSQARSCCSRLGRCCHVGKGYSG

SEQ ID NO: 920 - protein, 62 aa, Artificial Sequence
  Synthetic polypeptide
EVYKGGYTRPIPRPPPFVRPLPGGPIGPYNGCPVSCRGISFSQARSCCSRLGRCCHVGKGYS

SEQ ID NO: 921 - protein, 50 aa, Artificial Sequence
  Synthetic polypeptide
YRGGYTGPIPRPPPIGRPPLRLVVCACYRLSVSDARNCCIKFGSCCHLVK

SEQ ID NO: 922 - protein, 79 aa, Artificial Sequence
  Synthetic polypeptide
MRLVVCLVFLASFALVCQGQVYKGGYTRPIPRPPPFVRPLPGGPIGPYNGCPVSCRGISFSQARSCCSRLGRCCHVGKG

SEQ ID NO: 923 - protein, 72 aa, Artificial Sequence
  Synthetic polypeptide
MRLVVCLVFLASFALVCQGEAYRGGYTGPIPRPPPIGRPPFRPVCNACYRLSVSDARNCCIKFGSCCHLVKG

SEQ ID NO: 924 - protein, 19 aa, Artificial Sequence
  Synthetic polypeptide
LLASDEEIQDVSGTWYLKA

SEQ ID NO: 925 - protein, 14 aa, Artificial Sequence
  Synthetic polypeptide
SSSKEENRIIPGGI

SEQ ID NO: 926 - protein, 20 aa, Artificial Sequence
  Synthetic polypeptide
GMASKGAIAGKIAKVALKAL

SEQ ID NO: 927 - protein, 14 aa, Artificial Sequence
  Synthetic polypeptide
KRKFHEKHHSHRGY

SEQ ID NO: 928 - protein, 24 aa, Artificial Sequence
  Synthetic polypeptide
DSHAKRHHGYKRKFHEKHHSHRGY

SEQ ID NO: 929 - protein, 14 aa, Artificial Sequence
  Synthetic polypeptide
KRLFKKLKFSLRKY

SEQ ID NO: 930 - protein, 14 aa, Artificial Sequence
  Synthetic polypeptide
KRLFKELKFSLRKY

SEQ ID NO: 931 - protein, 15 aa, Artificial Sequence
  Synthetic polypeptide
YGRHSHHKEHFKRKC

SEQ ID NO: 932 - protein, 15 aa, Artificial Sequence
  Synthetic polypeptide
KRKFHEKHHSHRGYC

SEQ ID NO: 933 - protein, 14 aa, Artificial Sequence
  Synthetic polypeptide
KRLFKELLFSLRKY

SEQ ID NO: 934 - protein, 14 aa, Artificial Sequence
  Synthetic polypeptide
KRLFKELFFSLRKY

SEQ ID NO: 935 - protein, 14 aa, Artificial Sequence
  Synthetic polypeptide
LLLFLLKKRKKRKY

SEQ ID NO: 936 - protein, 14 aa, Artificial Sequence
  Synthetic polypeptide
KRLFKKLLFSLRKY

SEQ ID NO: 937 - protein, 14 aa, Artificial Sequence
  Synthetic polypeptide
KRLFKELLKSLRKY

SEQ ID NO: 938 - protein, 14 aa, Artificial Sequence
  Synthetic polypeptide
KRLFKELKKSLRKY

SEQ ID NO: 939 - protein, 19 aa, Artificial Sequence
  Synthetic polypeptide
IKISGKWKAQKRFLKMSGC

SEQ ID NO: 940 - protein, 18 aa, Artificial Sequence
  Synthetic polypeptide
GKWKAFKKAAKKFAKKCS

SEQ ID NO: 941 - protein, 18 aa, Artificial Sequence
  Synthetic polypeptide
GKWKLFKKAAKKFLKKCS

SEQ ID NO: 942 - protein, 18 aa, Artificial Sequence
  Synthetic polypeptide
GKLKKKWKAAKKFLKKCS

SEQ ID NO: 943 - protein, 29 aa, Artificial Sequence
  Synthetic polypeptide
CGGGGGGGGGKWKAFKKAFKKFAKILACG

SEQ ID NO: 944 - protein, 19 aa, Artificial Sequence
  Synthetic polypeptide
GKWKLFKKAFKKFLKILAG

SEQ ID NO: 945 - protein, 19 aa, Artificial Sequence
  Synthetic polypeptide
GKWKAFKKAFKKFAKILAG

SEQ ID NO: 946 - protein, 19 aa, Artificial Sequence
  Synthetic polypeptide
GKWKLFKKAFKKFLKILAC

SEQ ID NO: 947 - protein, 19 aa, Artificial Sequence
  Synthetic polypeptide
GRLRKKWKAFKKFLKILAC

SEQ ID NO: 948 - protein, 24 aa, Artificial Sequence
  Synthetic polypeptide
IGKFLHSAKKFAKAFAFVAEIMNS

SEQ ID NO: 949 - protein, 23 aa, Artificial Sequence
  Synthetic polypeptide
GIGKFLHSAKKFAKAFVAEIMNS

SEQ ID NO: 950 - protein, 23 aa, Artificial Sequence
  Synthetic polypeptide
GIGKFLHAAKKFAKAFVAEIMNS

SEQ ID NO: 951 - protein, 22 aa, Artificial Sequence
  Synthetic polypeptide
IGKFLHAAKKFAKAFVAEIMNS

SEQ ID NO: 952 - protein, 24 aa, Artificial Sequence
  Synthetic polypeptide
GIGKFLHSAKKFGKAFVGEIMNSK

SEQ ID NO: 953 - protein, 36 aa, Artificial Sequence
  Synthetic polypeptide
QKYYCRVRGGRCAVLSCLPKEEQIGKCSTRGRKCCR

SEQ ID NO: 954 - protein, 25 aa, Artificial Sequence
  Synthetic polypeptide
NQGRHFCGGALIHARYVMTAASCFQ

SEQ ID NO: 955 - protein, 18 aa, Artificial Sequence
  Synthetic polypeptide
RRLRRIIRKGIRIIKKYG

SEQ ID NO: 956 - protein, 18 aa, Artificial Sequence
  Synthetic polypeptide
KRLRRIIRKGIHIIKKYG

SEQ ID NO: 957 - protein, 18 aa, Artificial Sequence
  Synthetic polypeptide
KNLRRIIRKGIRIIKKYG

SEQ ID NO: 958 - protein, 18 aa, Artificial Sequence
  Synthetic polypeptide
KNLRRIIRKGIHIIKKYG

SEQ ID NO: 959 - protein, 18 aa, Artificial Sequence
  Synthetic polypeptide
KNLRRIIRKIAHIIKKYG

SEQ ID NO: 960 - protein, 18 aa, Artificial Sequence
  Synthetic polypeptide
KNLRRIIRKIDHIIKKYG

SEQ ID NO: 961 - protein, 18 aa, Artificial Sequence
  Synthetic polypeptide
KNLRRIIRKIEHIIKKYG

SEQ ID NO: 962 - protein, 18 aa, Artificial Sequence
  Synthetic polypeptide
KNLRRIIRKISHIIKKYG

SEQ ID NO: 963 - protein, 18 aa, Artificial Sequence
  Synthetic polypeptide
KNLRRIIRKITHIIKKYG

SEQ ID NO: 964 - protein, 18 aa, Artificial Sequence
  Synthetic polypeptide
KNLRRIIRKIGHIIKKYG

SEQ ID NO: 965 - protein, 18 aa, Artificial Sequence
  Synthetic polypeptide
KNLRRIIRKAIHIIKKYG

SEQ ID NO: 966 - protein, 18 aa, Artificial Sequence
  Synthetic polypeptide
KNLRRIIRKDIHIIKKYG

SEQ ID NO: 967 - protein, 18 aa, Artificial Sequence
  Synthetic polypeptide
KNLRRIIRKEIHIIKKYG

SEQ ID NO: 968 - protein, 18 aa, Artificial Sequence
  Synthetic polypeptide
KNLRRIIRKSIHIIKKYG

SEQ ID NO: 969 - protein, 18 aa, Artificial Sequence
  Synthetic polypeptide
KNLRRIIRKTIHIIKKYG

SEQ ID NO: 970 - protein, 18 aa, Artificial Sequence
  Synthetic polypeptide
KNLRRIARKIIHIIKKYG

SEQ ID NO: 971 - protein, 18 aa, Artificial Sequence
  Synthetic polypeptide
KNLRRIDRKIIHIIKKYG

SEQ ID NO: 972 - protein, 18 aa, Artificial Sequence
  Synthetic polypeptide
KNLRRIERKIIHIIKKYG

SEQ ID NO: 973 - protein, 18 aa, Artificial Sequence
  Synthetic polypeptide
KNLRRISRKIIHIIKKYG

SEQ ID NO: 974 - protein, 18 aa, Artificial Sequence
  Synthetic polypeptide
KNLRRITRKIIHIIKKYG

SEQ ID NO: 975 - protein, 18 aa, Artificial Sequence
  Synthetic polypeptide
KNLRRIGRKIIHIIKKYG

SEQ ID NO: 976 - protein, 18 aa, Artificial Sequence
  Synthetic polypeptide
KNLRRAIRKIIHIIKKYG

SEQ ID NO: 977 - protein, 18 aa, Artificial Sequence
  Synthetic polypeptide
KNLRRDIRKIIHIIKKYG

SEQ ID NO: 978 - protein, 18 aa, Artificial Sequence
  Synthetic polypeptide
KNLRREIRKIIHIIKKYG

SEQ ID NO: 979 - protein, 18 aa, Artificial Sequence
  Synthetic polypeptide
KNLRRSIRKIIHIIKKYG

SEQ ID NO: 980 - protein, 18 aa, Artificial Sequence
  Synthetic polypeptide
KNLRRTIRKIIHIIKKYG

SEQ ID NO: 981 - protein, 18 aa, Artificial Sequence
  Synthetic polypeptide
KNLRRGIRKIIHIIKKYG

SEQ ID NO: 982 - protein, 64 aa, Artificial Sequence
  Synthetic polypeptide
MRLHHLLLALLFLVLSAWSGFTQGVGNPVSCVRNKGICVPIRCPGSMKQIGTCVGRAVKCCRKK

SEQ ID NO: 983 - protein, 36 aa, Artificial Sequence
  Synthetic polypeptide
NSQSCRRNKGICVPIRCPGSMRQIGTCLGAQVKCCR

SEQ ID NO: 984 - protein, 69 aa, Artificial Sequence
  Synthetic polypeptide
MKTHYFLLVMICFLFSQMEPGVGILTSLGRRTDQYKCLQHGGFCLRSSCPSNTKLQGTCKPDKPNCCKS

SEQ ID NO: 985 - protein, 36 aa, Artificial Sequence
  Synthetic polypeptide
DHYNCVSSGGQCLYSACPIFTKIQGTCYRGKAKCCK

SEQ ID NO: 986 - protein, 123 aa, Artificial Sequence
  Synthetic polypeptide
MLLLLVENHAEIVVSTVEASAPQPHKNTTHTLSHAPAPQPHKNTKSPVPNLQHGITEGSLKPQECGPRCTARCSNTQYKKPCLFFCQKCCAKCLCVPPGTYGNKQVCPCYNNWKTKRGGPKCP

SEQ ID NO: 987 - protein, 115 aa, Artificial Sequence
  Synthetic polypeptide
MALRELLMMGILLLVCLAKVSSDVNMQKEEDEELRFPNHPLIVRDGNRRLMQDIDCGGLCKTRCSAHSRPNVCNRACGTCCVRCKCVPPGTSGNRELCGTCYTDMITHGNKTKCP

SEQ ID NO: 988 - protein, 96 aa, Artificial Sequence; identical to SEQ ID NO: 639
  Synthetic polypeptide

SEQ ID NO: 989 - protein, 90 aa, Artificial Sequence; identical to SEQ ID NO: 640
  Synthetic polypeptide

SEQ ID NO: 990 - protein, 88 aa, Artificial Sequence; identical to SEQ ID NO: 643
  Synthetic polypeptide

SEQ ID NO: 991 - protein, 88 aa, Artificial Sequence; identical to SEQ ID NO: 644
  Synthetic polypeptide

SEQ ID NO: 992 - protein, 84 aa, Artificial Sequence
  Synthetic polypeptide
MAGGRGRGGGGGGGVAGGGNLRPWECSPKCAGRCSNTQYKKACLTFCNKCCAKCLCVPPGTYGNKGACPCYNNWKTKEGGPKCP

SEQ ID NO: 993 - protein, 145 aa, Artificial Sequence; identical to SEQ ID NO: 653
  Synthetic polypeptide

SEQ ID NO: 994 - protein, 129 aa, Artificial Sequence
  Synthetic polypeptide
MASRNKAAALLLCFLFLAAVAASAAEMIAGSGIGDGEGEELDKGGGGGGGHHKHEGYKNKDGKGNLKPSQCGGECRRRCSKTHHKKPCLFFCNKCCAKCLCVPPGTYGNKETCPCYNNWKTKKGGPKCP

SEQ ID NO: 995 - protein, 4 aa, Artificial Sequence
  Synthetic polypeptide
PTHG

SEQ ID NO: 996 - protein, 5 aa, Artificial Sequence
  Synthetic polypeptide
PVPMR

SEQ ID NO: 997 - protein, 9 aa, Artificial Sequence
  Synthetic polypeptide
NGGVCIPIR

SEQ ID NO: 998 - protein, 11 aa, Artificial Sequence
  Synthetic polypeptide
QIGTCFGRPVL

SEQ ID NO: 999 - protein, 40 aa, Artificial Sequence
  Synthetic polypeptide
EGVRSYLSCWGNRGICLLNRCPGRMRQIGTCLAPRVKCCR

SEQ ID NO: 1000 - protein, 40 aa, Artificial Sequence
  Synthetic polypeptide
EGVRNFVTCRINRGFCVPIRCPGHRRQIGTCLGPQIKCCR

SEQ ID NO: 1001 - protein, 40 aa, Artificial Sequence
  Synthetic polypeptide
EGVRNFVTCRINRGFCVPIRCPGHRRQIGTCLGPRIKCCR

SEQ ID NO: 1002 - protein, 42 aa, Artificial Sequence
  Synthetic polypeptide
EGVRNHVTCRIYGGFCVPIRCPGRTRQIGTCFGRPVKCCRRW

SEQ ID NO: 1003 - protein, 40 aa, Artificial Sequence
  Synthetic polypeptide
EVVRNPQSCRWNMGVCIPISCPGNMRQIGTCFGPRVPCCR

SEQ ID NO: 1004 - protein, 41 aa, Artificial Sequence
  Synthetic polypeptide
ERVRNPQSCRWNMGVCIPFLCRVGMRQIGTCFGPRVPCCRR

SEQ ID NO: 1005 - protein, 42 aa, Artificial Sequence
  Synthetic polypeptide
EGVRNHVTCRINRGFCVPIRCPGRTRQIGTCFGPRIKCCRSW

SEQ ID NO: 1006 - protein, 38 aa, Artificial Sequence
  Synthetic polypeptide
DFASCHTNGGICLPNRCPGHMIQIGICFRPRVLCCRSW

SEQ ID NO: 1007 - protein, 17 aa, Artificial Sequence
  Synthetic polypeptide
ILKKWPWWPWPPFFRRK

SEQ ID NO: 1008 - protein, 15 aa, Artificial Sequence
  Synthetic polypeptide
ILKKWPWWPWPPRRK

SEQ ID NO: 1009 - protein, 15 aa, Artificial Sequence
  Synthetic polypeptide
ILKKWPWWPWRRWWK

SEQ ID NO: 1010 - protein, 15 aa, Artificial Sequence
  Synthetic polypeptide
ILKKWPWWPWRWWRR

SEQ ID NO: 1011 - protein, 16 aa, Artificial Sequence
  Synthetic polypeptide
ILKKWPWWPWWPWRRK

SEQ ID NO: 1012 - protein, 13 aa, Artificial Sequence
  Synthetic polypeptide
FFKKFPFFPFKKK

SEQ ID NO: 1013 - protein, 13 aa, Artificial Sequence
  Synthetic polypeptide
FFKKFPFFPFRRK

SEQ ID NO: 1014 - protein, 13 aa, Artificial Sequence
  Synthetic polypeptide
FFKKWPWWPWRRK

SEQ ID NO: 1015 - protein, 13 aa, Artificial Sequence
  Synthetic polypeptide
ILKKFPFFPFKKK

SEQ ID NO: 1016 - protein, 12 aa, Artificial Sequence
  Synthetic polypeptide
ILKKWPWWRWRR

SEQ ID NO: 1017 - protein, 16 aa, Artificial Sequence
  Synthetic polypeptide
ILPWKWPPWPPWPWRR

SEQ ID NO: 1018 - protein, 15 aa, Artificial Sequence
  Synthetic polypeptide
ILPWKWFFPPWPWRR

SEQ ID NO: 1019 - protein, 9 aa, Artificial Sequence
  Synthetic polypeptide
IKWPWYVWL

SEQ ID NO: 1020 - protein, 12 aa, Artificial Sequence
  Synthetic polypeptide
ILPWKWPWYVRR

SEQ ID NO: 1021 - protein, 14 aa, Artificial Sequence
  Synthetic polypeptide
ILKKWPWWPWKWKK

SEQ ID NO: 1022 - protein, 13 aa, Artificial Sequence
  Synthetic polypeptide
ILKKWPWWPWKRR

SEQ ID NO: 1023 - protein, 13 aa, Artificial Sequence
  Synthetic polypeptide
TLPCLWPWWPWSI

SEQ ID NO: 1024 - protein, 13 aa, Artificial Sequence
  Synthetic polypeptide
IVPWKWTLWPWRR

SEQ ID NO: 1025 - protein, 14 aa, Artificial Sequence
  Synthetic polypeptide
ILPWICPWRPSKAN

SEQ ID NO: 1026 - protein, 18 aa, Artificial Sequence
  Synthetic polypeptide
ILPWKWPWWPWWKKPWRR

SEQ ID NO: 1027 - protein, 16 aa, Artificial Sequence
  Synthetic polypeptide
ILPWKWPWWPWWPWRR

SEQ ID NO: 1028 - protein, 10 aa, Artificial Sequence
  Synthetic polypeptide
ILPWKWPWRR

SEQ ID NO: 1029 - protein, 11 aa, Artificial Sequence
  Synthetic polypeptide
PWKWPWWPWRR

SEQ ID NO: 1030 - protein, 15 aa, Artificial Sequence
  Synthetic polypeptide
ILPWKWPWWPWKKWK

SEQ ID NO: 1031 - protein, 15 aa, Artificial Sequence
  Synthetic polypeptide
ILPWKWPWWPWRRWR

SEQ ID NO: 1032 - protein, 15 aa, Artificial Sequence
  Synthetic polypeptide
ILPWKWPWWPWRKWR

SEQ ID NO: 1033 - protein, 14 aa, Artificial Sequence
  Synthetic polypeptide
ILPWKKWPWWRWRR

SEQ ID NO: 1034 - protein, 14 aa, Artificial Sequence
  Synthetic polypeptide
ILKPWKWPWWPWRR

SEQ ID NO: 1035 - protein, 16 aa, Artificial Sequence
  Synthetic polypeptide
ILKPWKWPWWPWRRKK

SEQ ID NO: 1036 - protein, 25 aa, Artificial Sequence
  Synthetic polypeptide
NQGRHFCGGALIHARFVMTAAHCFQ

SEQ ID NO: 1037 - protein, 80 aa, Artificial Sequence
  Synthetic polypeptide
MKTIILILLILGLGIDAKSLEESKADEEKFLRFIGSVIHGIGHLVHHIGVALGDDQQDNGKFYGYYAEDNGKHWYDTGDQ

SEQ ID NO: 1038 - protein, 80 aa, Artificial Sequence
  Synthetic polypeptide
MKTTILILLILGLGINAKSLEERKSEEEKLFKLLGKIIHHVGNFVHGFSHVFGDDQQDNGKFYGYYAEDNGKHWYDTGDQ

SEQ ID NO: 1039 - protein, 80 aa, Artificial Sequence
  Synthetic polypeptide
MKTTILILLILGLGINAKSLEERKSEEEKAFKLLGRIIHHVGNFVYGFSHVFGDDQQDNGKFYGHYAEDNGKHWYDTGDQ

SEQ ID NO: 1040 - protein, 80 aa, Artificial Sequence
  Synthetic polypeptide
MKTTILILLILGLGINAKSLEERKSEEEKVFHLLGKIIHHVGNFVYGFSHVFGDDQQDNGKFYGHYAEDNGKHWYDTGDQ

SEQ ID NO: 1041 - protein, 80 aa, Artificial Sequence
  Synthetic polypeptide
MKTTILILLILGLGINAKSLEERKSEEEKVFQFLGKIIHHVGNFVHGFSHVFGDDQQDNGKFYGHYAEDNGKHWYDTGDQ

SEQ ID NO: 1042 - protein, 14 aa, Artificial Sequence
  Synthetic polypeptide
RRRFPWWWPFLRRR

SEQ ID NO: 1043 - protein, 34 aa, Artificial Sequence
  Synthetic polypeptide
RSGRGECRRQCLRRHEGQPWETQECMRRCRRRGG

SEQ ID NO: 1044 - protein, 11 aa, Artificial Sequence
  Synthetic polypeptide
QIGTCFGRPVK

SEQ ID NO: 1045 - protein, 44 aa, Artificial Sequence
  Synthetic polypeptide
FTQGVRNSQSCRRNKGICVPIRCPGSMRQIGTCLGAQVKCCRRK

SEQ ID NO: 1046 - protein, 29 aa, Artificial Sequence
  Synthetic polypeptide
MGECVRGRCPSGMCCSQFGYCGKGPKYCG

SEQ ID NO: 1047 - protein, 15 aa, Artificial Sequence
  Synthetic polypeptide
SRAAGLAARLARLAL

SEQ ID NO: 1048 - protein, 20 aa, Artificial Sequence
  Synthetic polypeptide
MAARAAGLAARLAALALRAL

SEQ ID NO: 1049 - protein, 19 aa, Artificial Sequence
  Synthetic polypeptide
MAARAAGLAARLAALALRA

SEQ ID NO: 1050 - protein, 18 aa, Artificial Sequence
  Synthetic polypeptide
MAARAAGLAARLAALALR

SEQ ID NO: 1051 - protein, 20 aa, Artificial Sequence
  Synthetic polypeptide
MASRAAGLARRLARLARRAL

SEQ ID NO: 1052 - protein, 19 aa, Artificial Sequence
  Synthetic polypeptide
MASRAAGLARRLARLARRA

SEQ ID NO: 1053 - protein, 18 aa, Artificial Sequence
  Synthetic polypeptide
MASRAAGLARRLARLARR

SEQ ID NO: 1054 - protein, 20 aa, Artificial Sequence
  Synthetic polypeptide
MVSRAAGLAARLARLALRAL

SEQ ID NO: 1055 - protein, 19 aa, Artificial Sequence
  Synthetic polypeptide
MVSRAAGLAARLARLALRA

SEQ ID NO: 1056 - protein, 18 aa, Artificial Sequence
  Synthetic polypeptide
MVSRAAGLAARLARLALR

SEQ ID NO: 1057 - protein, 17 aa, Artificial Sequence
  Synthetic polypeptide
ASRAAGLAARLARLALR

SEQ ID NO: 1058 - protein, 20 aa, Artificial Sequence
  Synthetic polypeptide
MASRAAGLAARLARLALRAL

SEQ ID NO: 1059 - protein, 19 aa, Artificial Sequence
  Synthetic polypeptide
MASRAAGLAARLARLALRA

SEQ ID NO: 1060 - protein, 18 aa, Artificial Sequence
  Synthetic polypeptide
MASRAAGLAARLARLALR

SEQ ID NO: 1061 - protein, 7 aa, Artificial Sequence
  Synthetic polypeptide
HPAFDRK

SEQ ID NO: 1062 - protein, 7 aa, Artificial Sequence
  Synthetic polypeptide
HPAYDDK

SEQ ID NO: 1063 - protein, 7 aa, Artificial Sequence
  Synthetic polypeptide
HPDYNAT

SEQ ID NO: 1064 - protein, 7 aa, Artificial Sequence
  Synthetic polypeptide
HPDYNPD

SEQ ID NO: 1065 - protein, 7 aa, Artificial Sequence
  Synthetic polypeptide
HPDYNPK

SEQ ID NO: 1066 - protein, 7 aa, Artificial Sequence
  Synthetic polypeptide
YPCYDEY

SEQ ID NO: 1067 - protein, 7 aa, Artificial Sequence
  Synthetic polypeptide
HPDYNQR

SEQ ID NO: 1068 - protein, 7 aa, Artificial Sequence
  Synthetic polypeptide
HPAYNAK

SEQ ID NO: 1069 - protein, 7 aa, Artificial Sequence
  Synthetic polypeptide
YPCYDPA

SEQ ID NO: 1070 - protein, 7 aa, Artificial Sequence
  Synthetic polypeptide
HPQYNPR

SEQ ID NO: 1071 - protein, 7 aa, Artificial Sequence
  Synthetic polypeptide
HPQYNPK

SEQ ID NO: 1072 - protein, 21 aa, Artificial Sequence
  Synthetic polypeptide
GIGKFLHSAKKFKAFVGEIMN

SEQ ID NO: 1073 - protein, 20 aa, Artificial Sequence
  Synthetic polypeptide
AAGTTCVTTGWGLTRYTNAN

SEQ ID NO: 1074 - protein, 20 aa, Artificial Sequence [sequence omitted]

SEQ ID NO: 1075 - protein, 20 aa, Artificial Sequence
  Synthetic polypeptide
GNGVQCLAMGWGLLGRNRGI

SEQ ID NO: 1076 - protein, 20 aa, Artificial Sequence
  Synthetic polypeptide
EAQTRCQVAGWGSQSRSGGR

SEQ ID NO: 1077 - protein, 20 aa, Artificial Sequence
  Synthetic polypeptide
KPQDVCYVAGWGRMAPMGKY

SEQ ID NO: 1078 - protein, 20 aa, Artificial Sequence
  Synthetic polypeptide
KPGQTCSVAGWGQTAPLGKS

SEQ ID NO: 1079 - protein, 223 aa, Artificial Sequence
  Synthetic polypeptide
IIGGRESRPHSRPYMAYLQIQSPAGQSRCGGFLVREDFVLTAAHCWGSNINVTLGAHNIDRRENTQQHITARRAIRHPQYNQRTIQNDIMLLQLSRRVRRNRNVNPVALPRAQEGLRPGTLCTVAGWGRVSMRRGTDTLREVQLRVQRDRQCLRIFGSYDPRRQICVGDRRERKAAFKGDSGGPLLCNNVAHGIVSYGKSSGVPPEVFTRVSSFLPWIRTTMR

SEQ ID NO: 1080 - protein, 10 aa, Artificial Sequence
  Synthetic polypeptide
WGRVSMRRGT

SEQ ID NO: 1081 - protein, 15 aa, Artificial Sequence
  Synthetic polypeptide
CTVAGWGRVSMRRGT

SEQ ID NO: 1082 - protein, 13 aa, Artificial Sequence
  Synthetic polypeptide
RPGLTLCTVAGWG

SEQ ID NO: 1083 - protein, 7 aa, Artificial Sequence
  Synthetic polypeptide
HPLYNQR

SEQ ID NO: 1084 - protein, 7 aa, Artificial Sequence
  Synthetic polypeptide
HPEYNQR

SEQ ID NO: 1085 - protein, 7 aa, Artificial Sequence
  Synthetic polypeptide
HPNYNQR

SEQ ID NO: 1086 - protein, 7 aa, Artificial Sequence
  Synthetic polypeptide
HPQFNQR

SEQ ID NO: 1087 - protein, 7 aa, Artificial Sequence
  Synthetic polypeptide
HPQKNTY

SEQ ID NO: 1088 - protein, 7 aa, Artificial Sequence
  Synthetic polypeptide
HPQANQR

SEQ ID NO: 1089 - protein, 7 aa, Artificial Sequence
  Synthetic polypeptide
HHQYNQR

SEQ ID NO: 1090 - protein, 7 aa, Artificial Sequence
  Synthetic polypeptide
HPQYNPQ

SEQ ID NO: 1091 - protein, 5 aa, Artificial Sequence
  Synthetic polypeptide
IIGGV

SEQ ID NO: 1092 - protein, 5 aa, Artificial Sequence
  Synthetic polypeptide
IIGGH

SEQ ID NO: 1093 - protein, 7 aa, Artificial Sequence
  Synthetic polypeptide
APQYNQR

SEQ ID NO: 1094 - protein, 27 aa, Artificial Sequence
  Synthetic polypeptide
GKSSGVPPEVFTRFVSSFLPWIRTTMR

SEQ ID NO: 1095 - protein, 21 aa, Artificial Sequence
  Synthetic polypeptide
FKGDSGGPLLCNNVAHGIVSY

SEQ ID NO: 1096 - protein, 20 aa, Artificial Sequence
  Synthetic polypeptide
GSYDPRRQICVGDRRERKAA

SEQ ID NO: 1097 - protein, 20 aa, Artificial Sequence
  Synthetic polypeptide
DTLREVQLRVQRDRQCLRIF

SEQ ID NO: 1098 - protein, 20 aa, Artificial Sequence
  Synthetic polypeptide
RPGTLCTVAGWGRVSMRRGT

SEQ ID NO: 1099 - protein, 20 aa, Artificial Sequence
  Synthetic polypeptide
RVRRNRNVNPVALPRAQEGL

SEQ ID NO: 1100 - protein, 20 aa, Artificial Sequence
  Synthetic polypeptide
HPQYNQRTIQNDIMLLQLSR

SEQ ID NO: 1101 - protein, 20 aa, Artificial Sequence
  Synthetic polypeptide
RRENTQQHITARRAIRHPQY

SEQ ID NO: 1102 - protein, 20 aa, Artificial Sequence
  Synthetic polypeptide
TAAHCWGSNINVTLGAHNIQ

SEQ ID NO: 1103 - protein, 20 aa, Artificial Sequence
  Synthetic polypeptide
QSPAGQSRCGGFLVREDFVL

SEQ ID NO: 1104 - protein, 20 aa, Artificial Sequence
  Synthetic polypeptide
IIGGRESRPHSRPYMAYLQI

SEQ ID NO: 1105 - protein, 8 aa, Artificial Sequence
  Synthetic polypeptide
RHPQYNQR

SEQ ID NO: 1106 - protein, 6 aa, Artificial Sequence
  Synthetic polypeptide
HPQYNQ

SEQ ID NO: 1107 - protein, 7 aa, Artificial Sequence
  Synthetic polypeptide
HAQYNQR

SEQ ID NO: 1108 - protein, 7 aa, Artificial Sequence
  Synthetic polypeptide
HPQYNAR

SEQ ID NO: 1109 - protein, 7 aa, Artificial Sequence
  Synthetic polypeptide
HPQYNQA

SEQ ID NO: 1110 - protein, 7 aa, Artificial Sequence
  Synthetic polypeptide
HPQYAQR

SEQ ID NO: 1111 - protein, 7 aa, Artificial Sequence
  Synthetic polypeptide
HPAYNQR

SEQ ID NO: 1112 - protein, 7 aa, Artificial Sequence
  Synthetic polypeptide
HPAYNPR

SEQ ID NO: 1113 - protein, 7 aa, Artificial Sequence
  Synthetic polypeptide
HPAYNPK

SEQ ID NO: 1114 - protein, 7 aa, Artificial Sequence
  Synthetic polypeptide
HPQYNQR

SEQ ID NO: 1115 - protein, 5 aa, Artificial Sequence
  Synthetic polypeptide
IVGGR

SEQ ID NO: 1116 - protein, 5 aa, Artificial Sequence
  Synthetic polypeptide
IIGGR

SEQ ID NO: 1117 - protein, 37 aa, Artificial Sequence
  Synthetic polypeptide
GFFKKAWRKVKHAGRRVLDTAKGVGRHYVNNWLNRYR

SEQ ID NO: 1118 - protein, 28 aa, Artificial Sequence
  Synthetic polypeptide
RVIEVVQGAYRAIRHIPRRIRQGLERIL

SEQ ID NO: 1119 - protein, 21 aa, Artificial Sequence
  Synthetic polypeptide
YHELRDLLLIVTRIVELLGRE

SEQ ID NO: 1120 - protein, 28 aa, Artificial Sequence
  Synthetic polypeptide
LLSEVYQILQPILQELSATLQRIREVLR

SEQ ID NO: 1121 - protein, 25 aa, Artificial Sequence
  Synthetic polypeptide
FLIRQLIELLTWLFSNCRTLLSEVY

SEQ ID NO: 1122 - protein, 28 aa, Artificial Sequence
  Synthetic polypeptide
RVIEVVQGACRAIRHIPRRSRQGLERIL

SEQ ID NO: 1123 - protein, 28 aa, Artificial Sequence
  Synthetic polypeptide
RVIEVVQGACRASRHIPRRIRQGLERIL

SEQ ID NO: 1124 - protein, 28 aa, Artificial Sequence
  Synthetic polypeptide
RVIEVVQGACRAIRHIPRRIEQGLERIL

SEQ ID NO: 1125 - protein, 28 aa, Artificial Sequence
  Synthetic polypeptide
RVIEVVQGACRAIEHIPRRIRQGLERIL

SEQ ID NO: 1126 - protein, 28 aa, Artificial Sequence
  Synthetic polypeptide
RVIEVVQGACRAIEHIPRRIEQGLERIL

SEQ ID NO: 1127 - protein, 28 aa, Artificial Sequence
  Synthetic polypeptide
RVIRVVQGACRAIRHIPRRIRQGLRRIL

SEQ ID NO: 1128 - protein, 29 aa, Artificial Sequence
  Synthetic polypeptide
KIAGYGLKGLAVIIKICIKGLNLIFEIIK

SEQ ID NO: 1129 - protein, 29 aa, Artificial Sequence
  Synthetic polypeptide
RIIEFILNLGRICIRIIVALGRLGYGAIR

SEQ ID NO: 1130 - protein, 30 aa, Artificial Sequence
  Synthetic polypeptide
RIAGYGLRGLAVIPRRICIRGLNLIFEIIR

SEQ ID NO: 1131 - protein, 29 aa, Artificial Sequence
  Synthetic polypeptide
RIAGYGLRGLAVIIRIICRGLNLIFEIIR

SEQ ID NO: 1132 - protein, 29 aa, Artificial Sequence
  Synthetic polypeptide
RIAGYGLRGLAVIIRCIIRGLNLIFEIIR

SEQ ID NO: 1133 - protein, 22 aa, Artificial Sequence
  Synthetic polypeptide
RLLTWLRRTLLSRVYQILQEIL

SEQ ID NO: 1134 - protein, 25 aa, Artificial Sequence
  Synthetic polypeptide
RLLTWLFSNRRTLLSRVYQILQEIL

SEQ ID NO: 1135 - protein, 25 aa, Artificial Sequence
  Synthetic polypeptide
RLLTWLFSNCRTLLSRVYQILQPIL

SEQ ID NO: 1136 - protein, 28 aa, Artificial Sequence
  Synthetic polypeptide
LLSKVYQILQPILQKLSATLQKIKEVLK

SEQ ID NO: 1137 - protein, 28 aa, Artificial Sequence
  Synthetic polypeptide
RLVERIRQLTASLRQLIPQLIQYVRSLL

SEQ ID NO: 1138 - protein, 28 aa, Artificial Sequence
  Synthetic polypeptide
LLSRVYQILQPILQRLCATLQRIREVLR

SEQ ID NO: 1139 - protein, 27 aa, Artificial Sequence
  Synthetic polypeptide
LLSRVYQILQPILQRLSATLQAIREVL

SEQ ID NO: 1140 - protein, 23 aa, Artificial Sequence
  Synthetic polypeptide
RLVRRIRQLTASRQLIPQLIQYV

SEQ ID NO: 1141 - protein, 23 aa, Artificial Sequence
  Synthetic polypeptide
RLVERIRQLTASRQLIPQLIQYV

SEQ ID NO: 1142 - protein, 25 aa, Artificial Sequence
  Synthetic polypeptide
FLIKQLIKLLTWLFSNCKTLLSKVY

SEQ ID NO: 1143 - protein, 25 aa, Artificial Sequence
  Synthetic polypeptide
YVRSLLTRCNSFLWTLLRILQRILF

SEQ ID NO: 1144 - protein, 25 aa, Artificial Sequence
  Synthetic polypeptide
FLIRQLIRLLTWLFPNCRTLLSRVY

SEQ ID NO: 1145 - protein, 21 aa, Artificial Sequence
  Synthetic polypeptide
LLTRCNSFLWTLLRILQRILF

SEQ ID NO: 1146 - protein, 21 aa, Artificial Sequence
  Synthetic polypeptide
FLIRQLIRLLTWLFSNCRTLL

SEQ ID NO: 1147 - protein, 25 aa, Artificial Sequence
  Synthetic polypeptide
FLIRQLIRLLTWLFSNCRTLLSEVY

SEQ ID NO: 1148 - protein, 22 aa, Artificial Sequence
  Synthetic polypeptide
FLIRQLIRQLLTWQPILQYILQ

SEQ ID NO: 1149 - protein, 20 aa, Artificial Sequence
  Synthetic polypeptide
YHKLKLLLIVTKIVELLGKK

SEQ ID NO: 1150 - protein, 21 aa, Artificial Sequence
  Synthetic polypeptide
RRGLLEVIRTVILLLRRLRHY

SEQ ID NO: 1151 - protein, 21 aa, Artificial Sequence
  Synthetic polypeptide
RRGLLRVIRTVILLLDRLRHY

SEQ ID NO: 1152 - protein, 21 aa, Artificial Sequence
  Synthetic polypeptide
RRGLLEVIRCVILLLDRLRHY

SEQ ID NO: 1153 - protein, 18 aa, Artificial Sequence
  Synthetic polypeptide
RRGLLEVIRTVILLLRRL

SEQ ID NO: 1154 - protein, 18 aa, Artificial Sequence
  Synthetic polypeptide
RRGLLRVIRTVILLLDRL

SEQ ID NO: 1155 - protein, 18 aa, Artificial Sequence
  Synthetic polypeptide
RRGLLEVIRCVILLLDRL

SEQ ID NO: 1156 - protein, 21 aa, Artificial Sequence
  Synthetic polypeptide
YHRLRDLLLIVTRIVELLGRR

SEQ ID NO: 1157 - protein, 21 aa, Artificial Sequence
  Synthetic polypeptide
YHRLRDLLLIVCRIVELLGRR

SEQ ID NO: 1158 - protein, 18 aa, Artificial Sequence
  Synthetic polypeptide
YHRLRDLLLIVCRIVELL

SEQ ID NO: 1159 - protein, 18 aa, Artificial Sequence
  Synthetic polypeptide
RRGLLEVIRTVILALDRL

SEQ ID NO: 1160 - protein, 21 aa, Artificial Sequence
  Synthetic polypeptide
RRGLLEVIRTVILALDRLRHY

SEQ ID NO: 1161 - protein, 21 aa, Artificial Sequence
  Synthetic polypeptide
RRGLLEVIRTVILLLDRLRHY

SEQ ID NO: 1162 - protein, 18 aa, Artificial Sequence
  Synthetic polypeptide
RRGLLRVIRTVILALDIL

SEQ ID NO: 1163 - protein, 18 aa, Artificial Sequence
  Synthetic polypeptide
YHRLRDLALIVTRIVELL

SEQ ID NO: 1164 - protein, 21 aa, Artificial Sequence
  Synthetic polypeptide
RRGLLEVIRTVILPRRLLDRL

SEQ ID NO: 1165 - protein, 18 aa, Artificial Sequence
  Synthetic polypeptide
YHRLRDLLLIVTRIVELL

SEQ ID NO: 1166 - protein, 18 aa, Artificial Sequence
  Synthetic polypeptide
YHRLLRDLLIVTRIVELL

SEQ ID NO: 1167 - protein, 18 aa, Artificial Sequence
  Synthetic polypeptide
YHRLRDLLLIVRRIVCLL

SEQ ID NO: 1168 - protein, 18 aa, Artificial Sequence
  Synthetic polypeptide
YHRLRDLLLIVTRIVCLL

SEQ ID NO: 1169 - protein, 18 aa, Artificial Sequence
  Synthetic polypeptide
YHRLRDLLLIVTRIVRLL

SEQ ID NO: 1170 - protein, 18 aa, Artificial Sequence
  Synthetic polypeptide
YHRLRDLLLIVRRIVELL

SEQ ID NO: 1171 - protein, 18 aa, Artificial Sequence
  Synthetic polypeptide
YHRLRDLLRIVTRIVELL

SEQ ID NO: 1172 - protein, 18 aa, Artificial Sequence
  Synthetic polypeptide
YHRLRRLLLIVTRIVELL

SEQ ID NO: 1173 - protein, 21 aa, Artificial Sequence
  Synthetic polypeptide
YHRLLRDLLIVTRIVELLGRR

SEQ ID NO: 1174 - protein, 21 aa, Artificial Sequence
  Synthetic polypeptide
YHRLRDLLLIVRRIVCLLGRR

SEQ ID NO: 1175 - protein, 21 aa, Artificial Sequence
  Synthetic polypeptide
YHRLRDLLLIVTRIVCLLGRR

SEQ ID NO: 1176 - protein, 21 aa, Artificial Sequence
  Synthetic polypeptide
YHRLRDLLLIVTRIVRLLGRR

SEQ ID NO: 1177 - protein, 21 aa, Artificial Sequence
  Synthetic polypeptide
YHRLRDLLLIVRRIVELLGRR

SEQ ID NO: 1178 - protein, 21 aa, Artificial Sequence
  Synthetic polypeptide
YHRLRDLLRIVTRIVELLGRR

SEQ ID NO: 1179 - protein, 21 aa, Artificial Sequence
  Synthetic polypeptide
YHRLRRLLLIVTRIVELLGRR

SEQ ID NO: 1180 - protein, 27 aa, Artificial Sequence
  Synthetic polypeptide
LWETLGRVGRWVLAIPRRIRQGLELAL

SEQ ID NO: 1181 - protein, 28 aa, Artificial Sequence
  Synthetic polypeptide
DLWETLKKGGRWILAIPRRIKQGLELTL

SEQ ID NO: 1182 - protein, 20 aa, Artificial Sequence
  Synthetic polypeptide
RIRRPIALIWRGGRRLTEWL

SEQ ID NO: 1183 - protein, 18 aa, Artificial Sequence
  Synthetic polypeptide
WETLPRRIRGGRLWILAI

SEQ ID NO: 1184 - protein, 18 aa, Artificial Sequence
  Synthetic polypeptide
WILAIPRRIRGGRLWETL

SEQ ID NO: 1185 - protein, 16 aa, Artificial Sequence
  Synthetic polypeptide
LRRGGRWILAIPREIL

SEQ ID NO: 1186 - protein, 20 aa, Artificial Sequence
  Synthetic polypeptide
LWETLRRGGRWILAIPREIL

SEQ ID NO: 1187 - protein, 16 aa, Artificial Sequence
  Synthetic polypeptide
LRRGGRWILAIPRAIL

SEQ ID NO: 1188 - protein, 20 aa, Artificial Sequence
  Synthetic polypeptide
LWETLRRGGRWILAIPRAIL

SEQ ID NO: 1189 - protein, 16 aa, Artificial Sequence
  Synthetic polypeptide
LRRGGRWILAIPRRIR

SEQ ID NO: 1190 - protein, 20 aa, Artificial Sequence
  Synthetic polypeptide
LWRLLRRGGRWILAIPRRIR

SEQ ID NO: 1191 - protein, 20 aa, Artificial Sequence
  Synthetic polypeptide
LWELLRRGGRWILAIPRRIR

SEQ ID NO: 1192 - protein, 20 aa, Artificial Sequence
  Synthetic polypeptide
LWETLRRIIRWILAIPRRIR

SEQ ID NO: 1193 - protein, 20 aa, Artificial Sequence
  Synthetic polypeptide
LWETLRRGCRWILAIPRRIR

SEQ ID NO: 1194 - protein, 20 aa, Artificial Sequence
  Synthetic polypeptide
LWETLRRGGRWILAIPRRIR

SEQ ID NO: 1195 - protein, 21 aa, Artificial Sequence
  Synthetic polypeptide
DLWETLRRGCRWILAIPRRIR

SEQ ID NO: 1196 - protein, 21 aa, Artificial Sequence
  Synthetic polypeptide
DLWETLRRGGRWILAIPRRIR

SEQ ID NO: 1197 - protein, 21 aa, Artificial Sequence
  Synthetic polypeptide
DLWETLRRIIRWILAIPRRIR

SEQ ID NO: 1198 - protein, 27 aa, Artificial Sequence
  Synthetic polypeptide
LWRLLRRGGRWILAIPRRIRQGLELTL

SEQ ID NO: 1199 - protein, 27 aa, Artificial Sequence
  Synthetic polypeptide
LWELLRRGGRWILAIPRRIRQGLELTL

SEQ ID NO: 1200 - protein, 27 aa, Artificial Sequence
  Synthetic polypeptide
LWETLRRGGRWILAIPRRIRRQIELTL

SEQ ID NO: 1201 - protein, 27 aa, Artificial Sequence
  Synthetic polypeptide
LWETLRRGGRWILAIPRRIRRGLELTL

SEQ ID NO: 1202 - protein, 27 aa, Artificial Sequence
  Synthetic polypeptide
LWETLRRGGRWILAIPRRIRQGLRLTL

SEQ ID NO: 1203 - protein, 27 aa, Artificial Sequence
  Synthetic polypeptide
LWRTLRRGGRWILAIPRRIRQGLELTL

SEQ ID NO: 1204 - protein, 27 aa, Artificial Sequence
  Synthetic polypeptide
LWETLRRGCRWILAIPRRIRQGLELTL

SEQ ID NO: 1205 - protein, 27 aa, Artificial Sequence
  Synthetic polypeptide
LWETLRRGGRWILAIPRRIRQGLELCL

SEQ ID NO: 1206 - protein, 27 aa, Artificial Sequence
  Synthetic polypeptide
LWETLRRGGRWILAIPRRIRQGLELTL

SEQ ID NO: 1207 - protein, 28 aa, Artificial Sequence
  Synthetic polypeptide
DLWETLRRIIRWILAIPRRIRQGLELCL

SEQ ID NO: 1208 - protein, 28 aa, Artificial Sequence
  Synthetic polypeptide
DLWETLRRGCRWILAIPRRIRQGLELTL

SEQ ID NO: 1209 - protein, 28 aa, Artificial Sequence
  Synthetic polypeptide
DLWETLRRGGRWILAIPRRIRQGLELCL

SEQ ID NO: 1210 - protein, 28 aa, Artificial Sequence
  Synthetic polypeptide
DLWETLRRIIRWILAIPRRIRQGLELTL

SEQ ID NO: 1211 - protein, 28 aa, Artificial Sequence
  Synthetic polypeptide
KVIEVVQGACKAIKHIPKKIKQGLEKIL

SEQ ID NO: 1212 - protein, 19 aa, Artificial Sequence
  Synthetic polypeptide
RAIRRAIRGAPRAILRAIL

SEQ ID NO: 1213 - protein, 15 aa, Artificial Sequence
  Synthetic polypeptide
RAIRRAIRGAPRAIL

SEQ ID NO: 1214 - protein, 21 aa, Artificial Sequence
  Synthetic polypeptide
LIRRLGQRIRRPIHRIARCAG

SEQ ID NO: 1215 - protein, 21 aa, Artificial Sequence
  Synthetic polypeptide
LIRELGIRIRRPIHRIARCAG

SEQ ID NO: 1216 - protein, 21 aa, Artificial Sequence
  Synthetic polypeptide
LIRELGQRIRRPIRRIARCAG

SEQ ID NO: 1217 - protein, 21 aa, Artificial Sequence
  Synthetic polypeptide
LIRELGQRIRRPIHRIARCIG

SEQ ID NO: 1218 - protein, 21 aa, Artificial Sequence
  Synthetic polypeptide
LIRELGQRIRRPIHRIARCAI

SEQ ID NO: 1219 - protein, 21 aa, Artificial Sequence
  Synthetic polypeptide
LIRELGQRIRRPIHRIARCAR

SEQ ID NO: 1220 - protein, 21 aa, Artificial Sequence
  Synthetic polypeptide
LIRELGQRIRRPIHRIARCAG

SEQ ID NO: 1221 - protein, 24 aa, Artificial Sequence
  Synthetic polypeptide
LIRRLGQRIRRPIHRIARCAGQVV

SEQ ID NO: 1222 - protein, 24 aa, Artificial Sequence
  Synthetic polypeptide
LIRELGIRIRRPIHRIARCAGQVV

SEQ ID NO: 1223 - protein, 24 aa, Artificial Sequence
  Synthetic polypeptide
LIRELGQRIRRPIRRIARCAGQVV

SEQ ID NO: 1224 - protein, 24 aa, Artificial Sequence
  Synthetic polypeptide
LIRELGQRIRRPIHRIARCIGQVV

SEQ ID NO: 1225 - protein, 24 aa, Artificial Sequence
  Synthetic polypeptide
LIRELGQRIRRPIHRIARCAGRVV

SEQ ID NO: 1226 - protein, 24 aa, Artificial Sequence
  Synthetic polypeptide
LIRELRQRIRRPIHRIARCARQVV

SEQ ID NO: 1227 - protein, 24 aa, Artificial Sequence
  Synthetic polypeptide
LIRELGQRIRRPIHRIARCAGQVV

SEQ ID NO: 1228 - protein, 21 aa, Artificial Sequence
  Synthetic polypeptide
RIRRPIRRIIRCIGQVVEIVR

SEQ ID NO: 1229 - protein, 21 aa, Artificial Sequence
  Synthetic polypeptide
RIRRPIHRIIRCIGQVVRIVR

SEQ ID NO: 1230 - protein, 21 aa, Artificial Sequence
  Synthetic polypeptide
RIRRPIRRIARCAGQVVEIVR

SEQ ID NO: 1231 - protein, 21 aa, Artificial Sequence
  Synthetic polypeptide
RIRRPIHRIARCIGQVVEIVR

SEQ ID NO: 1232 - protein, 21 aa, Artificial Sequence
  Synthetic polypeptide
RIRRPIHRIARCAGRVVEIVR

SEQ ID NO: 1233 - protein, 21 aa, Artificial Sequence
  Synthetic polypeptide
RIRRPIHRIARCAGQVVRIVR

SEQ ID NO: 1234 - protein, 21 aa, Artificial Sequence
  Synthetic polypeptide
RIRRPIHRIARCAGQVVEIVR

SEQ ID NO: 1235 - protein, 28 aa, Artificial Sequence
  Synthetic polypeptide
LIRRLGQRIRRPIHRIARCAGQVVEIVR

SEQ ID NO: 1236 - protein, 28 aa, Artificial Sequence
  Synthetic polypeptide
LIRELGIRIRRPIHRIARCAGQVVEIVR

SEQ ID NO: 1237 - protein, 28 aa, Artificial Sequence
  Synthetic polypeptide
LIRELGQRIRRPIRRIARCAGQVVEIVR

SEQ ID NO: 1238 - protein, 28 aa, Artificial Sequence
  Synthetic polypeptide
LIRELGQRIRRPIHRIARCIGQVVEIVR

SEQ ID NO: 1239 - protein, 28 aa, Artificial Sequence
  Synthetic polypeptide
LIRELGQRIRRPIHRIARCAGRVVEIVR

SEQ ID NO: 1240 - protein, 28 aa, Artificial Sequence
  Synthetic polypeptide
LIRELGQRIRRPIHRIARCAGQVVRIVR

SEQ ID NO: 1241 - protein, 28 aa, Artificial Sequence
  Synthetic polypeptide
LIRELGQRIRRPIHRIARCAGQVVEIVR

SEQ ID NO: 1242 - protein, 17 aa, Artificial Sequence
  Synthetic polypeptide
RRIRHIPRAIRVVQGAC

SEQ ID NO: 1243 - protein, 21 aa, Artificial Sequence
  Synthetic polypeptide
RVIRVVRGACRAIRHIPRRIR

SEQ ID NO: 1244 - protein, 14 aa, Artificial Sequence
  Synthetic polypeptide
RACRAIRHIPRRIR

SEQ ID NO: 1245 - protein, 17 aa, Artificial Sequence
  Synthetic polypeptide
VVQRACRAIRHIPRRIR

SEQ ID NO: 1246 - protein, 20 aa, Artificial Sequence
  Synthetic polypeptide
GACRAIRRIPRRIRGLERIL

SEQ ID NO: 1247 - protein, 14 aa, Artificial Sequence
  Synthetic polypeptide
GACRAIRRIPRRIR

SEQ ID NO: 1248 - protein, 23 aa, Artificial Sequence
  Synthetic polypeptide
VVQGACRAIRRIPRRIRGLERIL

SEQ ID NO: 1249 - protein, 23 aa, Artificial Sequence
  Synthetic polypeptide
VVQGICRAIRHIPRRIRGLERIL

SEQ ID NO: 1250 - protein, 23 aa, Artificial Sequence
  Synthetic polypeptide
VVRGACRAIRHIPRRIRGLERIL

SEQ ID NO: 1251 - protein, 17 aa, Artificial Sequence
  Synthetic polypeptide
VVQRACRAIRRIPRRIR

SEQ ID NO: 1252 - protein, 17 aa, Artificial Sequence
  Synthetic polypeptide
VVQGICRAIRHIPRRIR

SEQ ID NO: 1253 - protein, 17 aa, Artificial Sequence
  Synthetic polypeptide
VVRGACRAIRHIPRRIR

SEQ ID NO: 1254 - protein, 28 aa, Artificial Sequence
  Synthetic polypeptide
RVIEVVQGACRAIRRIPRRIRQGLERIL

SEQ ID NO: 1255 - protein, 28 aa, Artificial Sequence
  Synthetic polypeptide
RVIEVVQGICRAIRHIPRRIRQGLERIL

SEQ ID NO: 1256 - protein, 28 aa, Artificial Sequence
  Synthetic polypeptide
RVIEVVRGACRAIRHIPRRIRQGLERIL

SEQ ID NO: 1257 - protein, 28 aa, Artificial Sequence
  Synthetic polypeptide
RVIRVVQGACRAIRHIPRRIRQGLERIL

SEQ ID NO: 1258 - protein, 21 aa, Artificial Sequence
  Synthetic polypeptide
RVIEVVQGACRAIRRIPRRIR

SEQ ID NO: 1259 - protein, 21 aa, Artificial Sequence
  Synthetic polypeptide
RVIEVVQGICRAIRHIPRRIR

SEQ ID NO: 1260 - protein, 21 aa, Artificial Sequence
  Synthetic polypeptide
RVIEVVRGACRAIRHIPRRIR

SEQ ID NO: 1261 - protein, 21 aa, Artificial Sequence
  Synthetic polypeptide
RVIRVVQGACRAIRHIPRRIR

SEQ ID NO: 1262 - protein, 28 aa, Artificial Sequence
  Synthetic polypeptide
RVIEVVQGACRAIRHIPRRIRQGLRRIL

SEQ ID NO: 1263 - protein, 28 aa, Artificial Sequence
  Synthetic polypeptide
RVIEVVQGACRAIRHIPRRIRQILERIL

SEQ ID NO: 1264 - protein, 28 aa, Artificial Sequence
  Synthetic polypeptide
RVISVVQGACRAIRRIPRRIRQGLERIL

SEQ ID NO: 1265 - protein, 21 aa, Artificial Sequence
  Synthetic polypeptide
RVISVVQGACRAIRRIPRRIR

SEQ ID NO: 1266 - protein, 14 aa, Artificial Sequence
  Synthetic polypeptide
GACRAIRHIPRRIR

SEQ ID NO: 1267 - protein, 17 aa, Artificial Sequence
  Synthetic polypeptide
VVQGACRAIRHIPRRIR

SEQ ID NO: 1268 - protein, 21 aa, Artificial Sequence
  Synthetic polypeptide
RVIEVVQGACRAIRHIPRRIR

SEQ ID NO: 1269 - protein, 29 aa, Artificial Sequence
  Synthetic polypeptide
RIAGYGLRGLAVIIRICIRGLNLIFEIIR

SEQ ID NO: 1270 - protein, 28 aa, Artificial Sequence
  Synthetic polypeptide
LLSRVYQILQPILQRLSATLQRIREVLR

SEQ ID NO: 1271 - protein, 25 aa, Artificial Sequence
  Synthetic polypeptide
FLIRQLIRLLTWLFSNCRTLLSRVY

SEQ ID NO: 1272 - protein, 28 aa, Artificial Sequence
  Synthetic polypeptide
DLWETLRRGGRWILAIPRRIRQGLELTL

SEQ ID NO: 1273 - protein, 15 aa, Artificial Sequence
  Synthetic polypeptide
RRIYRAIRHIPRRIR

SEQ ID NO: 1274 - protein, 14 aa, Artificial Sequence
  Synthetic polypeptide
GAYRAIRHIPRRIR

SEQ ID NO: 1275 - protein, 14 aa, Artificial Sequence
  Synthetic polypeptide
KLKKALRWLARHAK

SEQ ID NO: 1276 - protein, 14 aa, Artificial Sequence
  Synthetic polypeptide
KWKKALRALARHLK

SEQ ID NO: 1277 - protein, 26 aa, Artificial Sequence
  Synthetic polypeptide
IRALQRAVRHPRAIRRIYRGWKKAIR

SEQ ID NO: 1278 - protein, 23 aa, Artificial Sequence
  Synthetic polypeptide
IQRVAQKLKKALRALARHWKRAL

SEQ ID NO: 1279 - protein, 14 aa, Artificial Sequence
  Synthetic polypeptide
KLKKALRALARHWK

SEQ ID NO: 1280 - protein, 23 aa, Artificial Sequence
  Synthetic polypeptide
AIANFERLMKKLIWALMGEAVQT

SEQ ID NO: 1281 - protein, 23 aa, Artificial Sequence
  Synthetic polypeptide
AIAIFKRIAKINFKALMGEAVQT

SEQ ID NO: 1282 - protein, 23 aa, Artificial Sequence
  Synthetic polypeptide
AIAKFAKKALKSMLALMGEAVQT

SEQ ID NO: 1283 - protein, 30 aa, Artificial Sequence
  Synthetic polypeptide
KLKKALRALARHWKGWLRRIGRRIERVGQH

SEQ ID NO: 1284 - protein, 30 aa, Artificial Sequence
  Synthetic polypeptide
GWLRRIGRRIERVGQHKLKKALRALARHWK

SEQ ID NO: 1285 - protein, 28 aa, Artificial Sequence
  Synthetic polypeptide
KKIEKAIKHIPKKIKLKKALRALARHWK

SEQ ID NO: 1286 - protein, 31 aa, Artificial Sequence
  Synthetic polypeptide
RRIYRAIRHIPRRIRGWLRRIGRRIERVGQH

SEQ ID NO: 1287 - protein, 41 aa, Artificial Sequence
  Synthetic polypeptide
QRAVGWLRRIGRRIERVGQHLRALAGPGVTIGIAHAKSQLW

SEQ ID NO: 1288 - protein, 38 aa, Artificial Sequence
  Synthetic polypeptide
KLIRKLIRWLRRKIRALQRAVAGPGVTIGIAHAKSQLW

SEQ ID NO: 1289 - protein, 43 aa, Artificial Sequence
  Synthetic polypeptide
IRALQRAVRHPRAIRRIYRGWKKAIRAGPGVTIGIAHAKSQLW

SEQ ID NO: 1290 - protein, 40 aa, Artificial Sequence
  Synthetic polypeptide
IQRVAQKLKKALRALARHWKRALAGPGVTIGIAHAKSQLW

SEQ ID NO: 1291 - protein, 40 aa, Artificial Sequence
  Synthetic polypeptide
QRAVKKIEKAIKHIPKKIKIRALAGPGVTIGIAHAKSQLW

SEQ ID NO: 1292 - protein, 40 aa, Artificial Sequence
  Synthetic polypeptide
QRAVRRIYRAIRHIPRRIRIRALAGPGVTIGIAHAKSQLW

SEQ ID NO: 1293 - protein, 31 aa, Artificial Sequence
  Synthetic polypeptide
KLKKALRALARHWKAGPGVTIGIAHAKSQLW

SEQ ID NO: 1294 - protein, 32 aa, Artificial Sequence
  Synthetic polypeptide
KKIEKAIKHIPKKIKAGPGVTIGIAHAKSQLW

SEQ ID NO: 1295 - protein, 15 aa, Artificial Sequence
  Synthetic polypeptide
GGGGSGGGGSGGGGS

SEQ ID NO: 1296 - protein, 28 aa, Artificial Sequence
  Synthetic polypeptide
MGKNGSLCCFSLLLLLLLAGLASGHQVL

SEQ ID NO: 1297 - protein, 32 aa, Artificial Sequence
  Synthetic polypeptide
MGRIARGSKMSSLIVSLLVVLVSLNLASETTA

SEQ ID NO: 1298 - protein, 23 aa, Artificial Sequence
  Synthetic polypeptide
GIGKFLREAGKFGKAFVGEIMKP

SEQ ID NO: 1299 - protein, 16 aa, Artificial Sequence
  Synthetic polypeptide
IGEDVYTPGISGDSLR

SEQ ID NO: 1300 - protein, 6 aa, Artificial Sequence
  Synthetic polypeptide
AKSRWY

SEQ ID NO: 1301 - protein, 21 aa, Artificial Sequence
  Synthetic polypeptide
RQIIVFMRKKNFVTKILKKQR

SEQ ID NO: 1302 - protein, 12 aa, Artificial Sequence
  Synthetic polypeptide
RNSLPKVAYATA

SEQ ID NO: 1303 - protein, 21 aa, Artificial Sequence
  Synthetic polypeptide
LAKLAVKAIKGAIAGAKSAMG

SEQ ID NO: 1304 - protein, 37 aa, Artificial Sequence
  Synthetic polypeptide
KAIQTAQGVVAVAPGAKIIGDRINQGVKEIKKFLKWK

SEQ ID NO: 1305 - protein, 31 aa, Artificial Sequence
  Synthetic polypeptide
RPGGQIAIAIGESIRKKASNELKKATKSLWS

SEQ ID NO: 1306 - protein, 23 aa, Artificial Sequence
  Synthetic polypeptide
SNMIEGVFAKGFKKASHLFKGIG

SEQ ID NO: 1307 - protein, 23 aa, Artificial Sequence
  Synthetic polypeptide
SKMIEGVFAKGFKGASHLFKGIG

SEQ ID NO: 1308 - protein, 140 aa, Artificial Sequence
  Synthetic polypeptide
IIGGRESRPHSRPYMAYLQIQSPAGQSRCGGFLVREDFVLTAAHCWGSNINVTLGAHNIDRRENTQQHITARRAIRHPQYNQRTIQNDIMLLQLSRRVRRNRNVNPVALPRAQEGLRPGTLCTVAGWGRVSMRRGTDTLR

SEQ ID NO: 1309 - protein, 27 aa, Artificial Sequence
  Synthetic polypeptide
GIGGALLSAGKSALKGLAKGLAEHFAN

SEQ ID NO: 1310 - protein, 43 aa, Artificial Sequence
  Synthetic polypeptide
AAPCFCSGKPGRGDLWILRGTCPGGYGYTSNCYKWPNICCYPH

SEQ ID NO: 1311 - protein, 25 aa, Artificial Sequence
  Synthetic polypeptide
GIGAAILSAGKSIIKGLANGLAEHF

SEQ ID NO: 1312 - protein, 43 aa, Artificial Sequence
  Synthetic polypeptide
ATCDALSFSSKWLTVNHSACAIHCLTKGYKGGRCVNTICNCRN

SEQ ID NO: 1313 - protein, 15 aa, Artificial Sequence
  Synthetic polypeptide
VDKPDYRPRPRPPNM

SEQ ID NO: 1314 - protein, 83 aa, Artificial Sequence
  Synthetic polypeptide
DDMTMKPTPPPQYPLNLQGGGGGQSGDGFGFAVQGHQKVWTSDNGRHEIGLNGGYGQHLGGPYGNSEPSWKVGSTYTYRFPNF

SEQ ID NO: 1315 - protein, 21 aa, Artificial Sequence
  Synthetic polypeptide
AVDLAKIANIANKVLSSLFGK

SEQ ID NO: 1316 - protein, 34 aa, Artificial Sequence
  Synthetic polypeptide
TAGPAIRASVKQCQKTLKATRLFTVSCKGKNGCK

SEQ ID NO: 1317 - protein, 32 aa, Artificial Sequence
  Synthetic polypeptide
WKSESLCTPGCVTGALQTCFLQTLTCNCKISK

SEQ ID NO: 1318 - protein, 22 aa, Artificial Sequence
  Synthetic polypeptide
KRGSGWIATITDDCPNSVFVCC

SEQ ID NO: 1319 - protein, 62 aa, Artificial Sequence
  Synthetic polypeptide
GDVPPGIRNTICLMQQGTCRLFFCHSGEKKRDICSDPWNRCCVSNRDEEGKEKPKTDGRSGI

SEQ ID NO: 1320 - protein, 27 aa, Artificial Sequence
  Synthetic polypeptide
GIGASILSAGKSALKGFAKGLAEHFAN

SEQ ID NO: 1321 - protein, 32 aa, Artificial Sequence
  Synthetic polypeptide
GLLCYCRKGHCKRGERVRGTCGIRFLYCCPRR

SEQ ID NO: 1322 - protein, 43 aa, Artificial Sequence
  Synthetic polypeptide
KNYGNGVHCTKKGCSVDWGYAWTNIANNSVMNGLTGGNAGWHN

SEQ ID NO: 1323 - protein, 44 aa, Artificial Sequence
  Synthetic polypeptide
GKVWDWIKSTAKKLWNSEPVKELKNTALNAAKNFVAEKIGATPS

SEQ ID NO: 1324 - protein, 26 aa, Artificial Sequence
  Synthetic polypeptide
GLLSGILNTAGGLLGNLIGSLSNGES

SEQ ID NO: 1325 - protein, 26 aa, Artificial Sequence
  Synthetic polypeptide
GLLSGILNSAGGLLGNLIGSLSNGES

SEQ ID NO: 1326 - protein, 30 aa, Artificial Sequence
  Synthetic polypeptide
SVLSTITDMAKAAGRAALNAITGLVNQGEQ

SEQ ID NO: 1327 - protein, 22 aa, Artificial Sequence
  Synthetic polypeptide
GLMSVLGHAVGNVLGGLFKPKS

SEQ ID NO: 1328 - protein, 35 aa, Artificial Sequence
  Synthetic polypeptide
GGLKKLGKKLEGAGKRVFNAAEKALPVVAGAKALG

SEQ ID NO: 1329 - protein, 35 aa, Artificial Sequence
  Synthetic polypeptide
GGLKKLGKKLEGVGKRVFKASEKALPVAVGIKALG

SEQ ID NO: 1330 - protein, 99 aa, Artificial Sequence
  Synthetic polypeptide
RRFPWWWPFLRRPRLRRQAFPPPNVPGPRFPPPNVPGPRFPPPNFPGPRFPPPNFPGPRFPPPNFPPPFPPPIFPGPWFPPPPPFRPPPFGPPRFPGRR

SEQ ID NO: 1331 - protein, 40 aa, Artificial Sequence
  Synthetic polypeptide
AGWLRKLGKKIERIGQHTRDASIQVLGIAQQAANVAATAR

SEQ ID NO: 1332 - protein, 26 aa, Artificial Sequence
  Synthetic polypeptide
GKNGVFKTISHECHLNTWAFLATCCS

SEQ ID NO: 1333 - protein, 35 aa, Artificial Sequence
  Synthetic polypeptide
PLSCRRKGGICILIRCPGPMRQIGTCFGRPVKCCR

SEQ ID NO: 1334 - protein, 12 aa, Artificial Sequence
  Synthetic polypeptide
GLLDALSGILGL

SEQ ID NO: 1335 - protein, 15 aa, Artificial Sequence
  Synthetic polypeptide
GLLGTLGNLLNGLGL

SEQ ID NO: 1336 - protein, 19 aa, Artificial Sequence
  Synthetic polypeptide
GIIDIAKKLVGGIRNVLGI

SEQ ID NO: 1337 - protein, 18 aa, Artificial Sequence
  Synthetic polypeptide
GSNKGFNFMVDMIQALSN

SEQ ID NO: 1338 - protein, 18 aa, Artificial Sequence
  Synthetic polypeptide
GSNKGFNFMVDMINALSN

SEQ ID NO: 1339 - protein, 18 aa, Artificial Sequence
  Synthetic polypeptide
GSNKGFNFMVDMIQALSK

SEQ ID NO: 1340 - protein, 19 aa, Artificial Sequence
  Synthetic polypeptide
GLFTFIKCAYKLRAPAVAC

SEQ ID NO: 1341 - protein, 30 aa, Artificial Sequence
  Synthetic polypeptide
GFFTLIKAANKLINKTVNKEAGKGGLEIMA

SEQ ID NO: 1342 - protein, 33 aa, Artificial Sequence
  Synthetic polypeptide
GVLGTVKNLLIGAGKSAAQSVLKTLSCKLFNDC

SEQ ID NO: 1343 - protein, 15 aa, Artificial Sequence
  Synthetic polypeptide
VDKPDYRPRPWPRPN

SEQ ID NO: 1344 - protein, 45 aa, Artificial Sequence
  Synthetic polypeptide
INNWVRVPPCDQVCSRTNPEKDECCRAHGHAFHATCSGGMQCYRR

SEQ ID NO: 1345 - protein, 25 aa, Artificial Sequence
  Synthetic polypeptide
GLLSVLGSVAKHVLPHVVPVIAEHL

SEQ ID NO: 1346 - protein, 17 aa, Artificial Sequence
  Synthetic polypeptide
ALGGLLADVVKSKEQPA

SEQ ID NO: 1347 - protein, 12 aa, Artificial Sequence
  Synthetic polypeptide
ILGTILGLLKGL

SEQ ID NO: 1348 - protein, 14 aa, Artificial Sequence
  Synthetic polypeptide
INWKALLDAAKKVL

SEQ ID NO: 1349 - protein, 25 aa, Artificial Sequence
  Synthetic polypeptide
GLLSSLSSVAKHVLPHVVPVIAEHL

SEQ ID NO: 1350 - protein, 22 aa, Artificial Sequence
  Synthetic polypeptide
GLWQKIKDKASELVSGIVEGVK

SEQ ID NO: 1351 - protein, 25 aa, Artificial Sequence
  Synthetic polypeptide
GLLSSLSSVAKHVLPHVVPVIAEHL

SEQ ID NO: 1352 - protein, 23 aa, Artificial Sequence
  Synthetic polypeptide
GLWQKIKNAAGDLASGIVEGIKS

SEQ ID NO: 1353 - protein, 23 aa, Artificial Sequence
  Synthetic polypeptide
GLWQKIKSAAGDLASGIVEAIKS

SEQ ID NO: 1354 - protein, 23 aa, Artificial Sequence
  Synthetic polypeptide
GLWQKIKSAAGDLASGIVEGIKS

SEQ ID NO: 1355 - protein, 22 aa, Artificial Sequence
  Synthetic polypeptide
GLWEKIREKANELVSGIVEGVK

SEQ ID NO: 1356 - protein, 25 aa, Artificial Sequence
  Synthetic polypeptide
GLVASIGRALGGLLADVVKSKEQPA

SEQ ID NO: 1357 - protein, 25 aa, Artificial Sequence
  Synthetic polypeptide
GLVSSIGKALGGLLADVVKTKEQPA

SEQ ID NO: 1358 - protein, 25 aa, Artificial Sequence
  Synthetic polypeptide
GLLSVLGSVVKHVIPHVVPVIAEHL

SEQ ID NO: 1359 - protein, 25 aa, Artificial Sequence
  Synthetic polypeptide
GLLSVLGSVAQHVLPHVVPVIAEHL

SEQ ID NO: 1360 - protein, 25 aa, Artificial Sequence
  Synthetic polypeptide
GLLGVLGSVAKHVLPHVVPVIAEHL

SEQ ID NO: 1361 - protein, 28 aa, Artificial Sequence
  Synthetic polypeptide
GLWSKIKDVAAAAGKAALGAVNEALGEQ

SEQ ID NO: 1362 - protein, 29 aa, Artificial Sequence
  Synthetic polypeptide
GLWSTIKQKGKEAAIAAAKAAGQAALGAL

SEQ ID NO: 1363 - protein, 12 aa, Artificial Sequence
  Synthetic polypeptide
  misc_feature (1)..(2): Xaa can be any naturally occurring amino acid
  misc_feature (6)..(6): Xaa can be any naturally occurring amino acid
XXKEIXWIFHDN

SEQ ID NO: 1364 - protein, 16 aa, Artificial Sequence
  Synthetic polypeptide
VDKPDYRPRPWPRPNM

SEQ ID NO: 1365 - protein, 16 aa, Artificial Sequence
  Synthetic polypeptide
VDKPDYRPRPWPRNMI

SEQ ID NO: 1366 - protein, 581 aa, Artificial Sequence
  Synthetic polypeptide
MSGGDGRGHNTGAHSTSGNINGGPTGLGVGGGASDGSGWSSENNPWGGGSGSGIHWGGGSGHGNGGGNGNSGGGSGTGGNLSAVAAPVAFGFPALSTPGAGGLAVSISAGALSAAIADIMAALKGPFKFGLWGVALYGVLPSQIAKDDPNMMSKIVTSLPADDITESPVSSLPLDKATVNVNVRVVDDVKDERQNISVVSGVPMSVPVVDAKPTERPGVFTASIPGAPVLNISVNNSTPEVQTLSPGVTNNTDKDVRPAGFTQGGNTRDAVIRFPKDSGHNAVYVSVSDVLSPDQVKQRQDEENRRQQEWDATHPVEAAERNYERARAELNQANEDVARNQERQAKAVQVYNSRKSELDAANKTLADAIAEIKQFNRFAHDPMAGGHRMWQMAGLKAQRAQTDVNNKQAAFDAAAKEKSDADAALSAAQERRKQKENKEKDAKDKLDKESKRNKPGKATGKGKPVGDKWLDDAGKDSGAPIPDRIADKLRDKEFKNFDDFRKKFWEEVSKDPDLSKQFKGSNKTNIQKGKAPFARKKDQVGGRERFELHHDKPISQDGGVYDMNNIRVTTPKRHIDIHRGK

SEQ ID NO: 1367 - protein, 27 aa, Artificial Sequence
  Synthetic polypeptide
DVLKKIGTVALHAGKAALGAVADTISQ

SEQ ID NO: 1368 - protein, 17 aa, Artificial Sequence
  Synthetic polypeptide
PDPAKTAPKKKSKKAVT

SEQ ID NO: 1369 - protein, 20 aa, Artificial Sequence
  Synthetic polypeptide
  misc_feature (19)..(19): Xaa can be any naturally occurring amino acid
PDPAKTAPKKGSKKAVTKXA

SEQ ID NO: 1370 - protein, 47 aa, Artificial Sequence
  Synthetic polypeptide
YSSGYTRPLPKPSRPIFIRPIGCDVCYGIPSSTARLCCFRYGDCCHR

SEQ ID NO: 1371 - protein, 55 aa, Artificial Sequence
  Synthetic polypeptide
QGCKGPYTRPILRPYVRPVVSYNACTLSCRGITTTQARSCCTRLGRCCHVAKGYS

SEQ ID NO: 1372 - protein, 55 aa, Artificial Sequence
  Synthetic polypeptide
QGYKGPYTRPILRPYVRPVVSYNACTLSCRGITTTQARSCSTRLGRCCHVAKGYS

SEQ ID NO: 1373 - protein, 35 aa, Artificial Sequence
  Synthetic polypeptide
RWKIFKKIEKVGQNIRDGIVKAGPAVAVVGQAATI

SEQ ID NO: 1374 - protein, 40 aa, Artificial Sequence
  Synthetic polypeptide
GWLKKLGKRIERIGQHTRDATIQGLGIAQQAANVAATARG

SEQ ID NO: 1375 - protein, 39 aa, Artificial Sequence
  Synthetic polypeptide
GWLKKLGKRIERIGQHTRDATIQGLGIAQQAANVAATAR

SEQ ID NO: 1376 - protein, 39 aa, Artificial Sequence
  Synthetic polypeptide
GWLKKIGKKIERVGQHTRDATIQTIGVAQQAANVAATLK

SEQ ID NO: 1377 - protein, 34 aa, Artificial Sequence
  Synthetic polypeptide
VFIDILDKMENAIHKAAQAGIGIAKPIEKMILPK

SEQ ID NO: 1378 - protein, 35 aa, Artificial Sequence
  Synthetic polypeptide
RWKIFKKIERVGQNVRDGIIKAGPAIQVLGTAKAL

SEQ ID NO: 1379 - protein, 35 aa, Artificial Sequence
  Synthetic polypeptide
RWKFFKKIERVGQNVRDGLIKAGPAIQVLGAAKAL

SEQ ID NO: 1380 - protein, 35 aa, Artificial Sequence
  Synthetic polypeptide
RWKVFKKIEKVGRNIRDGVIKAGPAIAVVGQAKAL

SEQ ID NO: 1381 - protein, 35 aa, Artificial Sequence
  Synthetic polypeptide
RWKVFKKIEKVGRHIRDGVIKAGPAITVVGQATAL

SEQ ID NO: 1382 - protein, 37 aa, Artificial Sequence
  Synthetic polypeptide
PWNIFKEIERAVARTRDAVISAGPAVRTVAAATSVAS

SEQ ID NO: 1383 - protein, 22 aa, Artificial Sequence
  Synthetic polypeptide
QRFIHPTYRPPPQPRRPVIMRA

SEQ ID NO: 1384 - protein, 41 aa, Artificial Sequence
  Synthetic polypeptide
GKIPIGAIKKAGKAIGKGLRAVNIASTAHDVYTFFKPKKRH

SEQ ID NO: 1385 - protein, 13 aa, Artificial Sequence
  Synthetic polypeptide
SGFVLKGYTKTSQ

SEQ ID NO: 1386 - protein, 13 aa, Artificial Sequence
  Synthetic polypeptide
AGFVLKGYTKTSQ

SEQ ID NO: 1387 - protein, 29 aa, Artificial Sequence
  Synthetic polypeptide
GFLSTVKNLATNVAGTVIDTIKCKVTGGC

SEQ ID NO: 1388 - protein, 35 aa, Artificial Sequence
  Synthetic polypeptide
GGLKKLGKKLEGVGKRVFKASEKALPVLTGYKAIG

SEQ ID NO: 1389 - protein, 35 aa, Artificial Sequence; identical to SEQ ID NO: 1388
  Synthetic polypeptide

SEQ ID NO: 1390 - protein, 60 aa, Artificial Sequence
  Synthetic polypeptide
MVTLVLLVFLLLNVVEDEAASFPFSCPTLSGVCRKLCLPTEMFFGPLGCGKGFLCCVSHF

SEQ ID NO: 1391 - protein, 17 aa, Artificial Sequence
  Synthetic polypeptide
KWCFRVCYRGICYRRCR

SEQ ID NO: 1392 - protein, 39 aa, Artificial Sequence
  Synthetic polypeptide
GWLKKIGKKIERVGQNTRDATVKGLEVAQQAANVAATVR

SEQ ID NO: 1393 - protein, 39 aa, Artificial Sequence; identical to SEQ ID NO: 1375
  Synthetic polypeptide

SEQ ID NO: 1394 - protein, 39 aa, Artificial Sequence; identical to SEQ ID NO: 1375
  Synthetic polypeptide

SEQ ID NO: 1395 - protein, 39 aa, Artificial Sequence; identical to SEQ ID NO: 1375
  Synthetic polypeptide

SEQ ID NO: 1396 - protein, 39 aa, Artificial Sequence; identical to SEQ ID NO: 1375
  Synthetic polypeptide

SEQ ID NO: 1397 - protein, 40 aa, Artificial Sequence; identical to SEQ ID NO: 1331
  Synthetic polypeptide

SEQ ID NO: 1398 - protein, 39 aa, Artificial Sequence
  Synthetic polypeptide
GWLKKIGKKIERVGQHTRDATIQGLGVAQQAANVAATAR

SEQ ID NO: 1399 - protein, 36 aa, Artificial Sequence
  Synthetic polypeptide
GNFFKDLEKMGQRVRDAVISAAPAVDTLAKAKALGQ

SEQ ID NO: 1400 - protein, 55 aa, Artificial Sequence
  Synthetic polypeptide
VFVALILAIAIGQSEAGWLKKIGKKIERVGQHTRDATIQGLGIAQQAANVAATAR

SEQ ID NO: 1401 - protein, 43 aa, Artificial Sequence
  Synthetic polypeptide
QSEAGWLKKIGKKIERVGQHTRDATIQGLGVAQQAPNVAATAR

SEQ ID NO: 1402 - protein, 39 aa, Artificial Sequence; identical to SEQ ID NO: 137
  Synthetic polypeptide

SEQ ID NO: 1403 - protein, 39 aa, Artificial Sequence
  Synthetic polypeptide
GWLKKIGKKIERIGQHTRDATIQGVGIAQQAANVAATAR

SEQ ID NO: 1404 - protein, 39 aa, Artificial Sequence
  Synthetic polypeptide
GWLKKIGKKIERIGQHTRDATIQGLGIAQQAANVAATAR

SEQ ID NO: 1405 - protein, 52 aa, Artificial Sequence
  Synthetic polypeptide
MRTLAILAAILLFALLAQAKSLQETADDAATQEQPGEDDQDLAVSFEENGLS

SEQ ID NO: 1406 - protein, 21 aa, Artificial Sequence
  Synthetic polypeptide
CPPCPSCPSCPWCPMCPRCPS

SEQ ID NO: 1407 - protein, 40 aa, Artificial Sequence
  Synthetic polypeptide
VRNSQSCRRNKGICVPIRCPGSMRQIGTCLGAQVKCCRRK

SEQ ID NO: 1408 - protein, 18 aa, Artificial Sequence
  Synthetic polypeptide
IIGPVLGLVGKPLESLLE

SEQ ID NO: 1409 - protein, 36 aa, Artificial Sequence
  Synthetic polypeptide
DPVTCLKNGAICHPVFCPRRYKQIGTCGLPGTKCCK

SEQ ID NO: 1410 - protein, 36 aa, Artificial Sequence
  Synthetic polypeptide
DTLACRQSHGSCSFVACRAPSVDIGTCRGGKLKCCK

SEQ ID NO: 1411 - protein, 42 aa, Artificial Sequence
  Synthetic polypeptide
MKWTAAFLVLVIVVLMAQPGECFLGLIFHGLVHAGKLIHGLI

SEQ ID NO: 1412 - protein, 36 aa, Artificial Sequence; identical to SEQ ID NO: 914
  Synthetic polypeptide

SEQ ID NO: 1413 - protein, 36 aa, Artificial Sequence
  Synthetic polypeptide
NPVSCARNKGICVPSRCPGNMRQIGTCLGPPVKCCR

SEQ ID NO: 1414 - protein, 23 aa, Artificial Sequence
  Synthetic polypeptide
SNMIEGVFAKGFKKASHLFKGIG

SEQ ID NO: 1415 - protein, 82 aa, Artificial Sequence
  Synthetic polypeptide
MKAVFVLLVVGLCIMMMDVATAGFGCPNNYACHQHCKSIRGYCGGYCASWFRLRCTCYRCGGRRDDVEDIFDIYDNVAVERF

SEQ ID NO: 1416 - protein, 62 aa, Artificial Sequence
  Synthetic polypeptide
GDVPLGIRNTICRMQQGICRLFFCHSGEKKRDICSDPWNRCCVSNTDEEGKEKPEMDGRSGI

SEQ ID NO: 1417 - protein, 53 aa, Artificial Sequence
  Synthetic polypeptide
DLLPPRTPPYQEPASDLKVVDFRRSEGFCQEYCNYMETQVGYCPKKKDACCLH

SEQ ID NO: 1418 - protein, 32 aa, Artificial Sequence
  Synthetic polypeptide
VHISHQEARGPSFKICVGFLGPRWARGCSTGN

SEQ ID NO: 1419 - protein, 43 aa, Artificial Sequence
  Synthetic polypeptide
DLLPPRTPPYQVHISHQEARGPSFKICVGFLGPRWARGCSTGN

SEQ ID NO: 1420 - protein, 25 aa, Artificial Sequence
  Synthetic polypeptide
GIGGALLSAGKAALKGLAKGFAEHF

SEQ ID NO: 1421 - protein, 62 aa, Artificial Sequence
  Synthetic polypeptide
QVYKGGYTRPVPRPPPFVRPLPGGPIGPYNGCPVSCRGISFSQARSCCSRLGRCCHVGKGYS

SEQ ID NO: 1422 - protein, 61 aa, Artificial Sequence
  Synthetic polypeptide
QVYKGGYTRPIPRPPFVRPVPGGPIGPYNGCPVSCRGISFSQARSCCSRLGRCCHVGKGYS

SEQ ID NO: 1423 - protein, 24 aa, Artificial Sequence
  Synthetic polypeptide
GFLDKLKKGASDFANALVNSIKGT

SEQ ID NO: 1424 - protein, 22 aa, Artificial Sequence
  Synthetic polypeptide
GLWEKIKEKANELVSGIVEGVK

SEQ ID NO: 1425 - protein, 22 aa, Artificial Sequence
  Synthetic polypeptide
GLWEKIKEKASELVSGIVEGVK

SEQ ID NO: 1426 - protein, 22 aa, Artificial Sequence
  Synthetic polypeptide
FFHHIFRGIVHVGKSIHKLVTG

SEQ ID NO: 1427 - protein, 551 aa, Artificial Sequence
  Synthetic polypeptide
MSGGDGRGHNTGAHSTSGNINGGPTGLGVGGGASDGSGWSSENNPWGGGSGSGIHWGGGSGHGNGGGNGNSGGGSGTGGNLSAVAAPVAFGFPALSTPGAGGLAVSISAGALSAAIADIMAALKGPFKFGLWGVALYGVLPSQIAKDDPNMMSKIVTSLPADDITESPVSSLPLDKATVNVNVRVVDDVKDERQNISVVSGVPMSVPVVDAKPTERPGVFTASIPGAPVLNISVNNSTPAVQTLSPGVTNNTDKDVRPAGFTQGGNTRDAVIRFPKDSGHNAVYVSVSDVLSPDQVKQRQDEENRRQQEWDATHPVEAAERNYERARAELNQANEDVARNQERQAKAVQVYNSRKSELDAANKTLADAIAEIKQFNRFAHDPMAGGHRMWQMAGLKAQRAQTDVNNKQAAFDAAAKEKSDADAALSSAMESRKKKEDKKRSAENNLNDEKNKPRKGFKDYGHDYHPAPKTENIKGLGDLKPGIPKTPKQNGGGKRKRWTGDKGRKIYEWDSQHGELEGYRASDGQHLGSFDPKTGNQLKGPDPKRNIKKYL

SEQ ID NO: 1428 - protein, 29 aa, Artificial Sequence
  Synthetic polypeptide
VNHALCAAHCIARRYRGGYCNSKAVCVCR

SEQ ID NO: 1429 - protein, 40 aa, Artificial Sequence
  Synthetic polypeptide
ATCDLASGFGVGSSLCAAHCIARRYRGGYCNSKAVCVCRN

SEQ ID NO: 1430 - protein, 29 aa, Artificial Sequence
  Synthetic polypeptide
WNHTLCAAHCIARRYRGGYCNSKAVCVCR

SEQ ID NO: 1431 - protein, 34 aa, Artificial Sequence
  Synthetic polypeptide
SQWVTPNDSLCAAHCIARRYRGGYCNGKRVCVCR

SEQ ID NO: 1432 - protein, 33 aa, Artificial Sequence
  Synthetic polypeptide
SQWVTPNDSLCAAHCLVKGYRGGYCKNKICHCR

SEQ ID NO: 1433 - protein, 24 aa, Artificial Sequence
  Synthetic polypeptide
GNGVLKTISHECNMNTWQFLFTCC

SEQ ID NO: 1434 - protein, 24 aa, Artificial Sequence
  Synthetic polypeptide
FLPVIAGLAAKVLPKLFCAITKKC

SEQ ID NO: 1435 - protein, 45 aa, Artificial Sequence
  Synthetic polypeptide
GKVWDWIKSTAKKLWNSEPVKELKNTALNAAKNLVAEKIGATPSE

SEQ ID NO: 1436 - protein, 44 aa, Artificial Sequence
  Synthetic polypeptide
GKVWDWIKKTAKDVLNSDVAKQLKNKALNAAKNFVAEKIGATPS

SEQ ID NO: 1437 - protein, 33 aa, Artificial Sequence
  Synthetic polypeptide
GILDTLKNLAKTAGKGILKSLVNTASCKLSGQC

SEQ ID NO: 1438 - protein, 23 aa, Artificial Sequence
  Synthetic polypeptide
GLFGLAKGSVAKPHVVPVISQLV

SEQ ID NO: 1439 - protein, 22 aa, Artificial Sequence
  Synthetic polypeptide
SVLGKSVAKHLPHVVPVIAEKT

SEQ ID NO: 1440 - protein, 24 aa, Artificial Sequence
  Synthetic polypeptide
GLLSVLGSLKLIVPHVVPLIAEHL

SEQ ID NO: 1441 - protein, 25 aa, Artificial Sequence
  Synthetic polypeptide
GLFGILGSVAKHVLPHVVPVIAEHS

SEQ ID NO: 1442 - protein, 36 aa, Artificial Sequence
  Synthetic polypeptide
DSIQCFQKNNTCHTNQCPYFQDEIGTCYDRRGKCCQ

SEQ ID NO: 1443 - protein, 38 aa, Artificial Sequence
  Synthetic polypeptide
ADTLACRQSHGSCSFVACRAPSVDIGTCRGGLKKCCKW

SEQ ID NO: 1444 - protein, 37 aa, Artificial Sequence
  Synthetic polypeptide
NNEAQCEQAGGICSKDHCFHLHTRAFGHCQRGVPCRT

SEQ ID NO: 1445 - protein, 27 aa, Artificial Sequence
  Synthetic polypeptide
GIGGALLSAGKSALKGLAKGLAEHFAN

SEQ ID NO: 1446 - protein, 20 aa, Artificial Sequence
  Synthetic polypeptide
ILGPVLSLVGNALGGLLKNE

SEQ ID NO: 1447 - protein, 73 aa, Artificial Sequence
  Synthetic polypeptide
ALRSAVRTVARVGRAVLPHVAIADPYVRTPYVHNNPDWSLWRRKRWNQQPTSQADMLEDALEAQAIEALMQEQ

SEQ ID NO: 1448 - protein, 75 aa, Artificial Sequence
  Synthetic polypeptide
ALRGALRAVARVGKAILPHVAIANPYVRTPYVHNNPDWSLWRSRRRSGNQQPTSQAEILEDALEAQAIEALMQEQ

SEQ ID NO: 1449 - protein, 66 aa, Artificial Sequence
  Synthetic polypeptide
LKCVNLQANGIKMTQECAKEDTKCLTLRSLKKTLKFCASGRTCTTMKIMSLPGEQITCCEGNMCNA

SEQ ID NO: 1450 - protein, 20 aa, Artificial Sequence
  Synthetic polypeptide
LLGPVLGLVSNALGGLLKNI

SEQ ID NO: 1451 - protein, 33 aa, Artificial Sequence
  Synthetic polypeptide
GLLSVFKGVLKGVGKNVAGSLLDQLKCKISGGC

SEQ ID NO: 1452 - protein, 16 aa, Artificial Sequence
  Synthetic polypeptide
RLPPGFTPWRIAPAIV

SEQ ID NO: 1453 - protein, 15 aa, Artificial Sequence
  Synthetic polypeptide
FLPMLAKLLSGFLGK

SEQ ID NO: 1454 - protein, 33 aa, Artificial Sequence
  Synthetic polypeptide
GLFSVVKGVLKGVGKNVAGSLLDQLKCKISGGC

SEQ ID NO: 1455 - protein, 20 aa, Artificial Sequence
  Synthetic polypeptide
ILGPVLGLVGSALGGLIKKI

SEQ ID NO: 1456 - protein, 20 aa, Artificial Sequence
  Synthetic polypeptide
ILGPVLSLVGNALGGLIKKI

SEQ ID NO: 1457 - protein, 26 aa, Artificial Sequence
  Synthetic polypeptide
KIKWFKTMKSLAKFLAKEQMKKHLGE

SEQ ID NO: 1458 - protein, 23 aa, Artificial Sequence
  Synthetic polypeptide
CYREGGECLQRCIGLFHKIKCCK

SEQ ID NO: 1459 - protein, 45 aa, Artificial Sequence
  Synthetic polypeptide
FLPKTLRKFFCRIRGGRCAVLNCLGKEEQIGRCSNSGRKCCRKKK

SEQ ID NO: 1460 - protein, 36 aa, Artificial Sequence
  Synthetic polypeptide
DTIACIENKDTCRLKNCPRLHNVVGTCYEGKGKCCH

SEQ ID NO: 1461 - protein, 50 aa, Artificial Sequence
  Synthetic polypeptide
DLKHLILKAQLTRCYKFGGFCHYNICPGNSRFMSNCHPENLRCCKNIKQF

SEQ ID NO: 1462 - protein, 30 aa, Artificial Sequence
  Synthetic polypeptide
DCYCRIPACIAGERRYGTCIYQGRLWAFCC

SEQ ID NO: 1463 - protein, 36 aa, Artificial Sequence
  Synthetic polypeptide
NPVTCLRSGAICHPGFCPRRYKHIGVCGVSAIKCCK

SEQ ID NO: 1464 - protein, 36 aa, Artificial Sequence
  Synthetic polypeptide
NPVTCIRSGAICHPGFCPGRYKHIGVCGVPLIKCCK

SEQ ID NO: 1465 - protein, 36 aa, Artificial Sequence
  Synthetic polypeptide
NPVTCLRSGAICHPGFCPRRYKHIGICGVSAIKCCK

SEQ ID NO: 1466 - protein, 36 aa, Artificial Sequence; identical to SEQ ID NO: 1410
  Synthetic polypeptide

SEQ ID NO: 1467 - protein, 32 aa, Artificial Sequence
  Synthetic polypeptide
TQCRIRGGFCRVGSCRFPHIAIGKCATFISCC

SEQ ID NO: 1468 - protein, 51 aa, Artificial Sequence
  Synthetic polypeptide
DEEKRENEDEENQEDDEQSEMRRGLRSKIKEAAKTAGKMALGFVNDMAGEQ

SEQ ID NO: 1469 - protein, 51 aa, Artificial Sequence
  Synthetic polypeptide
EEEKRENEDEENQEDDEQSEMRRGLWSKIKEAAKTAGKMAMGFVNDMVGEQ

SEQ ID NO: 1470 - protein, 53 aa, Artificial Sequence
  Synthetic polypeptide
EEEKRENEDEEEQEDDEQSEEKRALWKTLLKGAGKVFGHVAKQFLGSQGQPES

SEQ ID NO: 1471 - protein, 48 aa, Artificial Sequence
  Synthetic polypeptide
EEEKREGENEKEQEDDNQSEEKRGLVSDLLSTVTGLLGNLGGGGLKKI

SEQ ID NO: 1472 - protein, 47 aa, Artificial Sequence
  Synthetic polypeptide
DEEKRENEDEENQEDDEQSEMRRGLRSKIWLWVLLMIWQESNKFKKM

SEQ ID NO: 1473 - protein, 35 aa, Artificial Sequence
  Synthetic polypeptide
RDVICLMQHGTCRLFFCHSGEKKSEICSDPWNRCC

SEQ ID NO: 1474 - protein, 38 aa, Artificial Sequence
  Synthetic polypeptide
LQDAALGWGRRCPRCPPCPNCRRCPRCPTCPSCNCNPK

SEQ ID NO: 1475 - protein, 38 aa, Artificial Sequence
  Synthetic polypeptide
LQDAALGWGRRCPRCPPCPNCRRCPRCPTCPRCNCNPK

SEQ ID NO: 1476 - protein, 38 aa, Artificial Sequence
  Synthetic polypeptide
LQDAALGWSRRCPRCPPCPNCRRCPRCPTCPSCNCNPK

SEQ ID NO: 1477 - protein, 21 aa, Artificial Sequence
  Synthetic polypeptide
DCRFCCGCCTDVSGCGVCCRF

SEQ ID NO: 1478 - protein, 61 aa, Artificial Sequence
  Synthetic polypeptide
FFFFDEKCSRINGRCTASCLKNEELVALCWKNLKCCVTVQSCGRSKGNQSDEGSGHMGTRG

SEQ ID NO: 1479 - protein, 54 aa, Artificial Sequence
  Synthetic polypeptide
DLKHLILKAQLARCYKFGGFCYNSMCPPHTKFIGNCHPDHLHCCINMKELEGST

SEQ ID NO: 1480 - protein, 78 aa, Artificial Sequence
  Synthetic polypeptide
MRLVVCLVFLASFALVCQGQVYKGGYTRPVPRPPFVRPLPGGPIGPYNGCPVSCRGISFSQARSCCSRLGRCCHVGKG

SEQ ID NO: 1481 - protein, 41 aa, Artificial Sequence
  Synthetic polypeptide
SLDKRACNFQSCWATCQAQHSIYFRRAFCDRSQCKCVFVRG

SEQ ID NO: 1482 - protein, 32 aa, Artificial Sequence
  Synthetic polypeptide
VDCRRSEGFCQEYCNYMETQVGYCSKKKDACC

SEQ ID NO: 1483 - protein, 51 aa, Artificial Sequence
  Synthetic polypeptide
AVGSLKSIGYEAELDHCHTNGGYCVRAICPPSARRPGSCFPEKNPCCKYMK

SEQ ID NO: 1484 - protein, 81 aa, Artificial Sequence
  Synthetic polypeptide
PRITIDRVVLARESWRFTVTGLGFATLTGQGDRFRRVQRWQHAHGLPRHLFGWTPMEERPFSLDLTSPASVDVLAGALRRT

SEQ ID NO: 1485 - protein, 58 aa, Artificial Sequence
  Synthetic polypeptide
KVTEQLKRCWGEYIRGYCRKICRISEIREVLCENGRYCCLNIVELEARRKITKPPPPE

SEQ ID NO: 1486 - protein, 52 aa, Artificial Sequence
  Synthetic polypeptide
LALGHMQPGRSEFKRCWKGQGACRTYCTRQETYLHMCPDASLCCLPYGSRPL

SEQ ID NO: 1487 - protein, 38 aa, Artificial Sequence
  Synthetic polypeptide
LSGRVLFPLSCIGSSGFCFPFRCPHNREEIGRCFFPIQ

SEQ ID NO: 1488 - protein, 36 aa, Artificial Sequence; identical to SEQ ID NO: 953
  Synthetic polypeptide

SEQ ID NO: 1489 - protein, 36 aa, Artificial Sequence
  Synthetic polypeptide
NSVTCSKNGGFCISPKCPPGMKQIGTCGLPGSKCCR

SEQ ID NO: 1490 - protein, 259 aa, Artificial Sequence
  Synthetic polypeptide
MNNLHRELAPISEAAWAQIEEEASRTLKRYLAARRVVDVPEAKGFGFSAVGTGHVERIDAPGSDIRAVRRNVLPLVELRVPFTLARDAIDDVERGAGDSDWQPLKDAAKKIAFAEDRAVFDGYAAAGILGLREGTSNPKLALPSSASDYPAAIAAALNQLRLAGVNGPYAVVLGAGVYTALSGGDDEGYPVFRHIESLIDGKIVWAPAIEGGFVLSTRGGDFELDIGQDFSIGYSSHSADSVELYLQESFTFQLLTTEA

SEQ ID NO: 1491 - protein, 260 aa, Artificial Sequence
  Synthetic polypeptide
MNNLHRELAPITSEAWAAIEEEAGRTFKRHIAGRRVVDVAGPHGVDFSAVGLGRTTGIAAPDEGVQARQRVVAPLVELRVPFTLSREELDNVERGAKDTDLDAVKEAARRIAFAEDRAIFEGYPAAGITGIRAAGSNAPITVPDDARLVPEAITQALTALRLAGVDGPYSVLLSAELYTEVSETSDHGYPIRTHIERLIPDGEIIWAPAIDGAFVLTTRGGDYELTLGQDVSIGYLSHDADTVRLYFQQTMQFLVHTAEA

SEQ ID NO: 1492 - protein, 253 aa, Artificial Sequence
  Synthetic polypeptide
MDLLKRELAPILPAAWDLIDHEATRVLKLHLAGRKVVDFRGPFGWEVAAVNTGRLRAIERKEGPAVSAGVRLVRPLVEFRAPIRLELAELDAVGRGAQEPNIEDVVRAAEHAARFEDGAIFNGLAAAGIEGILEVAPHKPVVIPAPEAWPRAVAEAREVLRAAGVDGPYALALGPKAYDELAAAAEDGYPLRKHIEGQLIDGPIVWAPALEGGVLLSTRGGDFELTVGEDLSIGYDGHDRQVVELFLTESFTF

SEQ ID NO: 1493 - protein, 259 aa, Artificial Sequence
  Synthetic polypeptide
MNNLHRELAPISSAAWEQIEEEVARTFKRSVAGRRVVDVEGPAGPELSAVGTGHLLDVAAPRELVNARLREVRTIVELTVPFELSRDAIDSVERGARDADWQPAKEAAQRLAFAEDNAIFDGYPAAGIVGIREGTSNRRLTLPADVGAYPDAISDALEALRLAGVDGPYSVVLGSDAYTALSEARDQGYPVLGHIKRIVSGEIIWAPAISGGCVLSTRGGDYELHLGEDVSIGYTSHTDKGVRLYLRETFTFLMLTSEA

SEQ ID NO: 1494 - protein, 259 aa, Artificial Sequence; identical to SEQ ID NO: 1493
  Synthetic polypeptide

SEQ ID NO: 1495 - protein, 266 aa, Artificial Sequence
  Synthetic polypeptide
MNDLMRDLAPISAKAWAEIETEARGTLTVTLAARKVVDFKGPLGWDASSVSLGRTEALAEEPKAAGSAAVVTVRKRAVQPLIELCVPFTLKRAELEAIARGASDADLDPVIEAARAIAIAEDRAVFHGFAAGGITGIGEASAEHALDLPADLADFPGVLVRALAVLRDRGVDGPYALVLGRTVYQQLMETTTPGGYPVLQHVRRLFEGPLIWAPGVDGAMLISQRGGDFELTVGRDFSIGYHDHDAQSVHLYLQESMTFRCLGPEA

SEQ ID NO: 1496 - protein, 226 aa, Artificial Sequence
  Synthetic polypeptide
PQDEWAELREAARQAADSIRVFRRYIPTTRVGRGVEYVPVEREGVRDAVKLVEISAKFKISQAALDYAKRTGQPLDAGDALRAAAELALEEDRLVAHTLLNLSNALKMAATSWDEPGKAVAEVSKAVAELIKAGAPGPYILFVDPARFAKLVSVYEKTGVMELTRIKAIVKDVVPTPVVPPSAALLISASPQTLDLVIGADTEVEYLGPEDGKHLFRLWETIAVRV

SEQ ID NO: 1497 - protein, 259 aa, Artificial Sequence
  Synthetic polypeptide
MNNLHRELAPIASSAWAQIEEEVARTFKRSVAGRRVVDVEGPAGPGLSAVGTGHLRDVTAPREQVSARLREVRNVVELTVPFELSRDAIDSVERGARDADWQPAKDAAQRLAFAEDGAIFDGYLAADIVGIREGTSNRKLILPTDVSAYPDAISDALEALRLAGVDGPYTVVLGSDAYTALSEARDQGYPVLGHIKRIVSGEIVWAPAISGGCVLSTRGGDYELHLGEDVSIGYTSHTDKVVRLYLRETFTFLMLTSEA

SEQ ID NO: 1498 - protein, 160 aa, Artificial Sequence
  Synthetic polypeptide
RSDLPVNRTLNIIHRAGVKYSLMEDELLLSKHPLSIIERGRKEKASDWDIPGSIANDVIRGIQILETNGYTDPVTIISPELYTRLFRVYDKSGTYEIKLVKHATEIIVSPLIKGLAVVSKKGFYVMENTPAKVEFLGREGINSDYIIWGKIAPYLIDTNA

SEQ ID NO: 1499 - protein, 259 aa, Artificial Sequence
  Synthetic polypeptide
MDNLHRKLAPISDAAWAQIEDEAARTLKRYLGARRVVDVHGPEGFGLSAVGTGHLRPATALAEGVESHRREVNPLLELRVPFTLTRAAIDDVARGSNDSDWQPLKDAARKIALAEDRLVFLGHGDAGIRGILPETSNPIVALPANVADYPEAVASAVSELRLAGVNGPYALILGTTAFTAANGGAEDGYPVLKHLERLVDVPVVWSQALEGGAVVTTRGGDFDLWLGQDISIGYLSHDAASVTLYLQESLTFQMQTSEA

SEQ ID NO: 1500 - protein, 66 aa, Artificial Sequence
  Synthetic polypeptide
KRSFTEYTQVIETVSKNKVFLEQLLLANPKLYDVMQKYNAGLLKKKRVKKLFESIYKYYKRSYLRS

SEQ ID NO: 1501 - protein, 259 aa, Artificial Sequence
  Synthetic polypeptide
MNNLHRELAPISSSAWEQIEEEVARTFKRSVAGRRVVDVDGPEGPELSAVGTGHLVEVAAPREQVNARLREVRTIVELTVPFELSRDAIDSVERGARDADWQPAKDAAQRLAFAEDGAIFDGYAAASIVGIREGTSNNKLTLPADVSAYPDAISDALEALRLAGVDGPYSVVLGSDAYTALSEARDQGYPVLGHIKRIVSGEIIWAPAISGGCVLSTRGGDYELHLGEDVSIGYTSHTDKVVRLYLRETFTFLMLTSEA

SEQ ID NO: 1502 - protein, 260 aa, Artificial Sequence
  Synthetic polypeptide
MDILRRENAQFPASIWSAIEKEAGLVFGKHLTGRKVVDFKGGLGIGFSSLPTGRVISSKEKLGEASVGVRMNTPVIELKIPFSFPESEVEAILREANAFDISSIEKAAKKVCVAENELVFYGLKKEGIEGLIPSIPHKPIKAKGDEILPAVAEGIKELVNSEIEGPYALLIQPQYFGKLFGVAGNSGYPLTLKLAELLQGNNIIVAPALKSGALLVSLRGGDYELYSGMDIGVGYSEKKSTNHELFFFETLTFRINTPEA

SEQ ID NO: 1503 - protein, 201 aa, Artificial Sequence
  Synthetic polypeptide
NIIKWDQQAIPFYETKVQDNAIIQSDKQVPYPLSIINTLFKVMPDLPKEETQPVFMKAYLTHSRKEDLLIYREHPLSILQRSKKMNRSDWNIPGNIVNDIVRAYEQVLSSGYSDVNLIIPPYVHALLYRVVDRTGTMEIELLRHLGNIYVSPNVDTIVVISKQVLYVYEKKSTTLENLGRDGVYEVYMLSSELAPYVTDPE

SEQ ID NO: 1504 - protein, 259 aa, Artificial Sequence
  Synthetic polypeptide
MNNLHRELAPISSAAWEQIEEEVARTFKRSVAGRRVVDVEGPKGPELSAVGTGHLRDVAAPREHVDARLREVRTIVELTVPFELDRAAIDSVERGARDADWQAAKEAAQRLAFAEDSAIFDGYPAAGIVGIREGTSNRKLTLPSDVGAYPDAISDALEALRLAGVDGPYSVLLGADAYTALSEARDQGYPVIEHIKRIVSGEIIWAPAISGGCVLSTRGGDYELHLGEDVSIGYASHTDKVVRLYLRETLTFLMLTSEA

SEQ ID NO: 1505 - protein, 259 aa, Artificial Sequence
  Synthetic polypeptide
MNNLHRELAPISRAAWSQIEDEVARTFRRSVAGRRVVDVKGPGGTELSGVGTGHQTAIAAPQQGVVAKLSEVKSLVELTVPFELQREAIDSVVRGAKDADWQPAKEAAKQLAYAEDRAIFDGYQAAGIGGIREGSSNPSLALPADVSDYPNAISNALEQLRLAGVDGPYSVLLGADAYTALGEARDQGYPVIEHIKRIVNGDIIWAPALAGGSVLSTRGGDFELHLGEDLSIGYTSHTDTVVRLYLRETLTFLMLTSEA

SEQ ID NO: 1506 - protein, 259 aa, Artificial Sequence
  Synthetic polypeptide
MNNLYRDLAPISAAAWAQIEEEVARTFKRSVAGRRVVDVKDPGGFGLAAVGTGHLRGIAAPQKGVDAKLREVKALVELTVPFELQRDEIDAVERGANDADWQPAKDAATELAYAEDRAIFDGYKAAGIVGIREGSSNSRLELPTDAADYPAAVGRALEQLRLAGVDGPYSVLLGADAYTALSEGSDDGYPTIDHIKRIVSGDIIWAPALNGGCVLSTRGGDFELHLGQDLSIGYQSHTDKVVRLYLRETLTFLMLTSEA

SEQ ID NO: 1507 - protein, 259 aa, Artificial Sequence; identical to SEQ ID NO: 1506
  Synthetic polypeptide

SEQ ID NO: 1508 - protein, 121 aa, Artificial Sequence
  Synthetic polypeptide
NNVFQNKEKNYYEAFYTEEKFKKALKVTTPEAYKSLVDLNIQKDSLNRARYGYIQRATVKTSPLSYFGKTTYYSLNKKDSEETLQLNNVVKYLILTAAMNDVEVMNLLRIKINPVFKKINN

SEQ ID NO: 1509 - protein, 157 aa, Artificial Sequence
  Synthetic polypeptide
IPLIWKDFTLDRRLYEAMRRKNTNVDASAALEAAYTVSSAEEMMILRGITRNGTTFEKNGLYEGAGQDYSTPKAIGTYGGIQDAVTDVYEMMDDSDVPTDSLRWNLSMSPNIYNKVNKSRSANDVKEMKDLLELLGTPNNPGNVFKSNTLPSVSTTG

SEQ ID NO: 1510 - protein, 36 aa, Artificial Sequence
  Synthetic polypeptide
NSVTCSKNGGFCISPKCLPGSKQIGTCSLPGSKCCK

SEQ ID NO: 1511 - protein, 182 aa, Artificial Sequence
  Synthetic polypeptide
RVGDLPPAIRQELEEFDRYINKQHLVATTLQADYGKHDQLINTIPKDINYLHNKLMSTKQALKFDSGQLVHLKELNNEITDDISKIMQLILQLSTPGTRLSSSFQLNEFFVKKIKKYYEILRQYEGVVAELDSILGGLERSCTEGFGNLFNIVEVIKSQYHLFMELCETMAQLHNEVNKLSK

SEQ ID NO: 1512 - protein, 44 aa, Artificial Sequence
  Synthetic polypeptide
AIHRALISKRMEGHCEAECLTFEVKIGGCRAELAPFCCKNRKKH

SEQ ID NO: 1513 - protein, 45 aa, Artificial Sequence
  Synthetic polypeptide
FFDEKCNKLKGTCKNNCGKNEELIALCQKSLKCCRTIQPCGSIID

SEQ ID NO: 1514 - protein, 33 aa, Artificial Sequence
  Synthetic polypeptide
YYGNGLYCNKEKCWVDWNQAKGEIGKIIVNGWV

SEQ ID NO: 1515 - protein, 36 aa, Artificial Sequence; identical to SEQ ID NO: 953
  Synthetic polypeptide

SEQ ID NO: 1516 - protein, 36 aa, Artificial Sequence
  Synthetic polypeptide
NPVTCLRSGAICHPGFCPRRYKHIGTCGLSVIKCCK

SEQ ID NO: 1517 - protein, 36 aa, Artificial Sequence
  Synthetic polypeptide
DHYNCVRSGGQCLYSACPIYTRIQGTCYHGKAKCCK

SEQ ID NO: 1518 - protein, 36 aa, Artificial Sequence
  Synthetic polypeptide
DHYNCVSSGGQCLYSACPIFTKIQGTCYGGKAKCCK

SEQ ID NO: 1519 - protein, 32 aa, Artificial Sequence
  Synthetic polypeptide
NPQSCRWNMGVCIPISFLVNMRQIGTCFGPRV

SEQ ID NO: 1520 - protein, 107 aa, Artificial Sequence
  Synthetic polypeptide
REYRFHNQLATTEKPEILPRIVSDGIVWARRRWRIRPTDVPRPETGERDVEYLLRLEGWRTQLGLPAEIYVAQVTPTAMGLRRKKPQWVHFEHPYSLWAAFTHLDPH

SEQ ID NO: 1521 - protein, 36 aa, Artificial Sequence
  Synthetic polypeptide
NPLSCRLNRGICVPIRCPGNLRQIGTCFTPSVKCCR

SEQ ID NO: 1522 - protein, 104 aa, Artificial Sequence
  Synthetic polypeptide
MKVLLAITLVAILGVASGTQFSLCQAPSERRHELVNCVKTHLNEQASQKLSEVKQRLNCEDLDCVFTKICELSSDTHQEHANTFLPDDVKTDVRAALTQCRPSN

SEQ ID NO: 1523 - protein, 36 aa, Artificial Sequence
  Synthetic polypeptide
DSYICARKGGTCNLSPCPLYNRVEGTCYRGKAKCCI

SEQ ID NO: 1524 - protein, 36 aa, Artificial Sequence
  Synthetic polypeptide
DSYICARKGGTCNLSPCPLYNRIEGTCYRGKAKCCI

SEQ ID NO: 1525 - protein, 36 aa, Artificial Sequence; identical to SEQ ID NO: 1524
  Synthetic polypeptide

SEQ ID NO: 1526 - protein, 36 aa, Artificial Sequence; identical to SEQ ID NO: 1523
  Synthetic polypeptide

SEQ ID NO: 1527 - protein, 96 aa, Artificial Sequence
  Synthetic polypeptide
MRPMSIACAVAVIIACVCALQSAALPSEVRLDPEVRLEEPEDSEAARSIDQGVAAALAKETSPEVLFRTKRQSHLSLCRYCCNCCKNKGCGFCCRF

SEQ ID NO: 1528 - protein, 259 aa, Artificial Sequence
  Synthetic polypeptide
MNNLHRELAPIASSAWAQIEEEVARTFKRSVAGRRVVDVEGPAGPGLSAVGTGHLRDVTAPREQVSARLREVRNVVELTVPFELSRDAIDSVERGARDADWQPAKDAAQRLAFAEDGAIFDGYLAADIVGIREGTSNRKLTLPTDVSAYPDAISDALEALRLAGVDGPYTVVLGSDAYTALSEARDQGYPVLGHIKRIVSGEIVWAPAISGGCVLSTRGGDYELHLGEDVSIGYTSHTDKVVRLYLRETFTFLMLTSEA

SEQ ID NO: 1529 - protein, 236 aa, Artificial Sequence
  Synthetic polypeptide
ARTFKRSVAGRRVVDVEGPGGTELSGVGTGHQTAIAAPQQGVVARLAEVKRLVEFTVPFELQREAIDSVLRGANDADWQPAKDAAKELAYAEDRAIFDGYQAAGIGGIREGSSNAPLALPADIGDYPHAIGNALEELRLAGVDGPYSVLLGADAYTALSEARDQGYPVIEHIKRIVNGDIIWAPALTGGSVLSTRGGDFELHLGEDLSIGYLSHTDSVVRLYLRETLTFLMLTSEA

SEQ ID NO: 1530 - protein, 259 aa, Artificial Sequence
  Synthetic polypeptide
MNNLHRELAPISSEAWSQIEEEVARTFKRSVAGRRVVDVKGPGGVDLSGVGTGHQSTIAAPHHGVIAKLSEVKALVQLTVPFELSRDAIDAVERGANDSDWQAAKDAAKELAYAEDRAIFDGYKAAGIVGIREGSSNTSLALPADVADYPNAIGGALQQLRLAGVDGPYSVLLGADAYTALGEASDQGYPVIEHIKRIVNGEIIWAPALEGGSVLSMRGGDYELHLGQDVSIGYQSHTDSTVRLYLRETLTFLMLTSEA

SEQ ID NO: 1531 - protein, 36 aa, Artificial Sequence
  Synthetic polypeptide
NPISCARNRGVCIPIGCLPGMKQIGTCGLPGTKCCR

SEQ ID NO: 1532 - protein, 34 aa, Artificial Sequence
  Synthetic polypeptide
QIVNCKKNEGFCQKYCNFMETQVGYCSKKKEACC

SEQ ID NO: 1533 - protein, 257 aa, Artificial Sequence
  Synthetic polypeptide
NLHRNLAPVTEVAWQQIGEEAARTFKRHVAGRRVVDVAGPFGYSYSAHNLGRVTPIKTSDSRIRAQQRQVNPLVELRFPFTLSRAEVDDVARGSLDSDWQPVKDAAKAVAFAEDQSIFQGFDEAGIRGLGPSSDNPVLSLPEDPLLIPDAVASALSALRLAGVEGPYSVVLDADAYTAVSETRDEGHPVFHHLRDLVAGDIIWAPAISGGYVLSTRGGDNQLTLGTDLSIGYDSHTATDVTLYLEETFTFASLTAEA

SEQ ID NO: 1534 - protein, 36 aa, Artificial Sequence; identical to SEQ ID NO: 953
  Synthetic polypeptide

SEQ ID NO: 1535 - protein, 36 aa, Artificial Sequence
  Synthetic polypeptide
NHRSCHRIKGVCAPDRCPRNMRQIGTCFGPPVKCCR

SEQ ID NO: 1536 - protein, 59 aa, Artificial Sequence
  Synthetic polypeptide
MFTLKKSLLLLFFLGTISLSLCEEERNAEEERRDYPEERDVEVEKRIIPLPLGYFAKKT

SEQ ID NO: 1537 - protein, 21 aa, Artificial Sequence
  Synthetic polypeptide
FTMKKSLLLLFFLGTINFSLC

SEQ ID NO: 1538 - protein, 36 aa, Artificial Sequence
  Synthetic polypeptide
DHYICAKKGGTCNFSPCPLFNRIEGTCYSGKAKCCI

SEQ ID NO: 1539 - protein, 152 aa, Artificial Sequence
  Synthetic polypeptide
PSVVDQIAKVEDILKRLNLIKRERIQVLKDLKEKILILNKKSIANYEQQLFQQELEKYRGFQNRLVQATHKQAALMRELTVAFNGLLQDKRVRAEQSKYESFQRQRGAVIGRYKRAYQEFLDLEAGLQSAKTWYKEMKETVESLEKNVETFV

SEQ ID NO: 1540 - protein, 36 aa, Artificial Sequence; identical to SEQ ID NO: 953
  Synthetic polypeptide

SEQ ID NO: 1541 - protein, 40 aa, Artificial Sequence
  Synthetic polypeptide
IRNPVTCIRSGAICYPRSCPGSYKQIGVCGVSVIKCCKKP

SEQ ID NO: 1542 - protein, 233 aa, Artificial Sequence
  Synthetic polypeptide
PDFMIAASDADAVVRGEFTPVLGELHLGVNSLDYAYFARLHPHRDDLLREVDLDFPRPRLLVMAPMEAGANLVPRTQRALVRPQDHLVALTSRVPFPTRGRPLNGADLTVAEQPDGWEIRVPGGERFDLMEIFAQPLKTALMARVSFFRDEHLPRISFGRLVVVREQWRIAADELAFAAVRDTRDRYVHARRWWRRRDLPTRVFVKSPLERKPFHVDADSPALVELLCAAVRR

SEQ ID NO: 1543 - protein, 259 aa, Artificial Sequence
  Synthetic polypeptide
MNNLHRELAPIASAAWEQIEEEVARTFKRSVAGRRVVDVEGPKGPALSAVGTGHLRDVDAPREQVSARLREVRAIVELTVPFELSRDAIDSVERGARDADWQPAKDAAQRLAFAEDHAIFDGYAAAGIIGIREGSSNRRLTLPDDVGAYPDAISDALEALRLAGVDGPYSVLLGADAYTALSEARDQGYPVIDHIKRIVSGEIIWAPAISGGCVLSTRGGDYELHLGEDVSIGYTSHTDKVVRLYLRETFTFLMLTSEA

SEQ ID NO: 1544 - protein, 259 aa, Artificial Sequence; identical to SEQ ID NO: 1493
  Synthetic polypeptide

SEQ ID NO: 1545 - protein, 121 aa, Artificial Sequence; identical to SEQ ID NO: 1508
  Synthetic polypeptide

SEQ ID NO: 1546 - protein, 36 aa, Artificial Sequence
  Synthetic polypeptide
QKYYCRVRGGRCAVLTCLPKEEQIGKCSTRGRKCCR

SEQ ID NO: 1547 - protein, 35 aa, Artificial Sequence
  Synthetic polypeptide
RDVICLTQHGTCRLFFCHFGERKAEICSDPWNRCC

SEQ ID NO: 1548 - protein, 35 aa, Artificial Sequence
  Synthetic polypeptide
DQYICARKGGTCNFSPCPLFTRIDGTCYRGKAKCC

SEQ ID NO: 1549 - protein, 36 aa, Artificial Sequence
  Synthetic polypeptide
NPQSCHRNKGICVPIRCPGNMRQIGTCLGPPVKCCR

SEQ ID NO: 1550 - protein, 36 aa, Artificial Sequence
  Synthetic polypeptide
NPVSCVRNKAICVPIRSPANMKQIGSCVGRAVKCCR

SEQ ID NO: 1551 - protein, 28 aa, Artificial Sequence
  Synthetic polypeptide
GLLSGILGAGKNIVCGLSGLLKLESEII

SEQ ID NO: 1552 - protein, 31 aa, Artificial Sequence
  Synthetic polypeptide
GLWDTIKQAGKKFFLNVLDKIRCKVAGGCRT

SEQ ID NO: 1553 - protein, 67 aa, Artificial Sequence
  Synthetic polypeptide
VLSYKEAVLRAIDGINQRSSDANLYRLLDLDPRPTMDGDPDTPKPVSFTVKETVCPRTTQQSPEDCD

SEQ ID NO: 1554 - protein, 67 aa, Artificial Sequence
  Synthetic polypeptide
ALSYREAVLRAVDRINERSSEANLYRLLELDPPPKDVEDRGARKPTSFTVKETVCPRTSPQPPEQCD

SEQ ID NO: 1555 - protein, 29 aa, Artificial Sequence
  Synthetic polypeptide
GFMDTAKNVAKNVAVTLLDNLKCKITKAC

SEQ ID NO: 1556 - protein, 33 aa, Artificial Sequence
  Synthetic polypeptide
GLLDTFKNLALNAAKSAGVSVLNSLSCKLFKTC

SEQ ID NO: 1557 - protein, 36 aa, Artificial Sequence; identical to SEQ ID NO: 983
  Synthetic polypeptide

SEQ ID NO: 1558 - protein, 67 aa, Artificial Sequence; identical to SEQ ID NO: 1553
  Synthetic polypeptide

SEQ ID NO: 1559 - protein, 6 aa, Artificial Sequence
  Synthetic polypeptide
RRWWFR

SEQ ID NO: 1560 - protein, 6 aa, Artificial Sequence
  Synthetic polypeptide
RRWFWR

SEQ ID NO: 1561 - protein, 157 aa, Artificial Sequence
  Synthetic polypeptide
MKCLQSVLVLVLLLAMVSAQNTNTTNTRIGGFAGGSGLLPGPAIGGGIGIPGGVLLPGSFQGGISGGIIHQYGLDCSGNSLSPQTGNCRYYLRNPVNRRYYCTRNQKPAYKCPLLRPDCPDTRSGPPVECYTDNDCGPLDKCCCDACLDHYVCKPAA

SEQ ID NO: 1562 - protein, 575 aa, Artificial Sequence
  Synthetic polypeptide
MLQQSDALHSALREVPLGVGDIPYNDFHVRGPPPVYTNGKKLDGIYQYGHIETNDNTAQLGGKYRYGEILESEGSIRDLRNSGYRSAENAYGGHRGLGRYRAAPVGRLHRRELQPGEIPPGVATGAVGPGGLLGTGGMLAADGILAGQGGLLGGGGLLGDGGLLGGGGVLGVLGEGGILSTVQGITGLRIVELTLPRVSVRLLPGVGVYLSLYTRVAINGKSLIGFLDIAVEVNITAKVRLTMDRTGYPRLVIERCDTLLGGIKVKLLRGLLPNLVDNLVNRVLADVLPDLLCPIVDVVLGLVNDQLGLVDSLIPLGILGSVQYTFSSLPLVTGEFLELDLNTLVGEAGGGLIDYPLGWPAVSPKPMPELPPMGDNTKSQLAMSANFLGSVLTLLQKQHALDLDITNGMFEELPPLTTATLGALIPKVFQQYPESCPLIIRIQVLNPPSVMLQKDKALVKVLATAEVMVSQPKDLETTICLIDVDTEFLASFSTEGDKLMIDAKLEKTSLNLRTSNVGNFDIGLMEVLVEKIFDLAFMPAMNAVLGSGVPLPKILNIDFSNADIDVLEDLLVLSA

SEQ ID NO: 1563 - protein, 19 aa, Artificial Sequence
  Synthetic polypeptide
FIGAILPAIAGLVGGLINR

SEQ ID NO: 1564 - protein, 19 aa, Artificial Sequence
  Synthetic polypeptide
FIGAILPAIAGLVHGLINR

SEQ ID NO: 1565 - protein, 259 aa, Artificial Sequence
  Synthetic polypeptide
MNNLHRELAPVSASAWQQIEEEVARTFKRSVAGRRVVDVEGPAGPALSAVGTGHLCDVAAPRELVSARLREVRTIVELTVPFELSRDAIDSVERGARDADWQPAKDAAQRLAFAEDGAIFDGYAAAGIVGIREGTSNRKLALPADVSAYPDAISDALEALRLAGVDGPYSVVLGSDAYTALSEARDQGYPVLGHIKRIVSGEIIWAPAISGGCVLSTRGGDYELHLGEDVSIGYTSHTDKVVRLYLRETLTFLMLTGEA

SEQ ID NO: 1566 - protein, 60 aa, Artificial Sequence
  Synthetic polypeptide
MNFTKLFIMVAIAVLLIAGIQPVEAAPRMEIGKRREKLGRNVFKAAKKALPVIAGYKALG

SEQ ID NO: 1567 - protein, 83 aa, Artificial Sequence
  Synthetic polypeptide
MKVASVCILLAVLLCSAAVADATVYAYASTCARCKSIGAKYCGYGTLRTKGVSCDGQTMIRSCADCKARFGRCVDSYITECFL

SEQ ID NO: 1568 - protein, 90 aa, Artificial Sequence
  Synthetic polypeptide
AFEPHEERALQDERQTKGHRLKRQFSLNFGATHEDGYGTDVNAEALANLWKSASGNTKLEGSASYMQHFGGVGGDGKARISGNLLFSHNY

SEQ ID NO: 1569 - protein, 36 aa, Artificial Sequence
  Synthetic polypeptide
NPQSCRWNMGVCIPISCPGNMRQIGTCFGPRVPCCR

SEQ ID NO: 1570 - protein, 20 aa, Artificial Sequence
  Synthetic polypeptide
FLSLALAALPKFLCLVFKKC

SEQ ID NO: 1571 - protein, 34 aa, Artificial Sequence
  Synthetic polypeptide
RIVDCKRSEGFCQEYCNYLETQVGYCSKKKDACC

SEQ ID NO: 1572 - protein, 35 aa, Artificial Sequence
  Synthetic polypeptide
PQSCHRNKGVCVPIRCPRSMRQIGTCLGAPVKCCR

SEQ ID NO: 1573 - protein, 138 aa, Artificial Sequence
  Synthetic polypeptide
KRSFTEYTQVIETVSKNKVFLEQLLLANPKLYDVMQKYNAGLLKKKRVKKLFESIYKYYKRSYLRSTPFGLFSETSIGVFSKSSQYKLMGKTTKGIRLDTQWLIRLVHKMEVDFSKKLSFTRNNANYKFGDRVFQVYT

SEQ ID NO: 1574 - protein, 31 aa, Artificial Sequence
  Synthetic polypeptide
GFGVGDSACAAHCIARRNRGGYCNAKTVCVC

SEQ ID NO: 1575 - protein, 101 aa, Artificial Sequence
  Synthetic polypeptide
MSETEAEASVIGIIELFHKYTGRDDMIDKPGLLKMLQDNFPNFLAACDKKGTDYLANVFEKKDKNRDKKIDFSEFLSLLGDIATDYHKQSHGAPACSEGDQ

SEQ ID NO: 1576 - protein, 36 aa, Artificial Sequence
  Synthetic polypeptide
RWKFFKKIEKVGQNIRDGIIKAGPAVAVVGQAAAIS

SEQ ID NO: 1577 - protein, 30 aa, Artificial Sequence
  Synthetic polypeptide
PDFKLPGMKYPIPATTPPFVPKRSRFPIYA

SEQ ID NO: 1578 - protein, 62 aa, Artificial Sequence
  Synthetic polypeptide
MNFKKILFFVFACLVFTVTAAPEPRWKFFKKIEKVGQNIRDGIIKAGPAVAVVGQAAAISGK

SEQ ID NO: 1579 - protein, 85 aa, Artificial Sequence
  Synthetic polypeptide
MKTFSVAVAVAVVLTFICLQESSAVSFTEVQELEEPMSNGSPVAAYEEMSEESWKMPYASRRWRCRFCCRCCPRMRGCGLCCQRR

SEQ ID NO: 1580 - protein, 38 aa, Artificial Sequence
  Synthetic polypeptide
LQDAALGWGRRCPRCPPCPRCSWCPRCPTCPRCNCNPK

SEQ ID NO: 1581 - protein, 38 aa, Artificial Sequence
  Synthetic polypeptide
LQDAALGWGRRCPRCPPCPRCSWCPRCPTCPGCNCNPK

SEQ ID NO: 1582 - protein, 38 aa, Artificial Sequence
  Synthetic polypeptide
LQDAAVGWGRRCPQCPRCPSCPSCPRCPRCPRCKCNPK

SEQ ID NO: 1583 - protein, 38 aa, Artificial Sequence; identical to SEQ ID NO: 1582
  Synthetic polypeptide

SEQ ID NO: 1584 - protein, 38 aa, Artificial Sequence; identical to SEQ ID NO: 1582
  Synthetic polypeptide

SEQ ID NO: 1585 - protein, 36 aa, Artificial Sequence
  Synthetic polypeptide
SPLSCRGNRGVCLPIRCPGRLRQIGTCFGPRVPCCR

SEQ ID NO: 1586 - protein, 51 aa, Artificial Sequence
  Synthetic polypeptide
DDSIQCFQKNNTCHTNQCPYFQDEIGTCYDKRGKCCQKRLLHIRVPRKKKV

SEQ ID NO: 1587 - protein, 48 aa, Artificial Sequence
  Synthetic polypeptide
CLASPSVFRRLTDPPGDARGRRRLAASLHRYLMRAVGRATPNGLWAGI

SEQ ID NO: 1588 - protein, 442 aa, Artificial Sequence
  Synthetic polypeptide
KQIASKITIYQGKELQLFRKLVELKLLRQCITIPNNRGIITSIIQFLEEYEVGKEIIPLLEELHAALHSFEKSSSFERINDWNEIKRILSLLQKGDKKVGSEIIYEDVIFKDVRKDTITPKIRKSFLEGLADFILLFDVNVRVQYEIAQLFYEKYGKSTEKLSNSNLLNEVFFREIHQFYPYYQNQKYRYKEAKAKEIQQLDELRDQFLKEFESLILNVDQSVEVIDIELLIEKYTSLIPEYIKKDSNISYTLFLQETTDENIVLNNVYDGQEKFISRFKDFFMPHYETKEYSNYIERVLNEDNCYEVDELFGFNGGIHERKSHNIVNLDVGYQRFNHKDAKQVRDFKVRYNTERKKIEFLDDNYKICNLVYKSSLVPMFLPGILSVMLYLFQSGRLNFDITSLVKEENYVPRITFGNVVLSRKKWKVIMEDLKDILESKLE

SEQ ID NO: 1589 - protein, 221 aa, Artificial Sequence
  Synthetic polypeptide
HPDIVDYFMKRHNWHFKFFHYEEDDKIKGAYFICNDQNIGILTRRTFPLSSDEILIPMAPDLRCFLPDRTNRLSALHQPQIRNAIWKLTRKKQNCLVKEAFSSKFEKTRRNEYQRFLKKGGSVKSVADCSSDELTHIFIELFRSRFGNTSSCYPADNLANFFSQLHHLLFGHILYIEGIPCAFDIVLKSESQMNVYFDVSNGAIKNECRPLSPGSILMWLN

SEQ ID NO: 1590 - protein, 223 aa, Artificial Sequence
  Synthetic polypeptide
HPDVVSYFMIHHDWKFDFFHYEKDGDIKGSYFLCNGKQIGIMARRSYPLSSDEVLIPFSPHARCFFPDKTNKLSIINKQNIINATWKIARKKQNCIIKESFSPKFEKTRRNEIQRFIRNGGEIKCISQLSDKEISSSYISLFHSRFGGTLPCYEYDNLLMFISHLRELMFGHVLFWDNKPCAIDIVLKSESSCNVYYDVPNGAVLNDENCMKLSPGSVLMWLN

SEQ ID NO: 1591 - protein, 221 aa, Artificial Sequence
  Synthetic polypeptide
HPDIVDYFMKRHNWHFKFFHYKEDDKIKGAYFICNDQNIGILTRRTFPLSSDEILIPMAPDLRCFLPDRTNRLSALHQPQIRNAIWKLTRKKQNCLVKETFSSKFEKRRRNEYQQFLKKGGSVKSVADCSSDELTHIFIELFQSRFGNTLSCYPADNLATFFSQLHHLLFGHILYIEGIPCAFDIVLKSESQMNVYFDVSNGAIKNEFRPLSPGSILMWLN

SEQ ID NO: 1592 - protein, 152 aa, Artificial Sequence
  Synthetic polypeptide
KNDAKSIIISEEDFKDVDFTNANLPHSFAIKFNVLNAETEKIQLDAIAGATANLLIGRFGHGNAAIAEIINEITEHEELQANDSILAEIVHLPESRIGNILSRPEMRNYEMAYLAKSNKENQFQIKISDLYVSVRNGNIILRSKALNKQIIP

SEQ ID NO: 1593 - protein, 36 aa, Artificial Sequence; identical to SEQ ID NO: 782
  Synthetic polypeptide

SEQ ID NO: 1594 - protein, 227 aa, Artificial Sequence
  Synthetic polypeptide
IINGSDCDMHTQPWQAALLLRPNQLYCGAVLVHPQWLLTAAHCRKKVFRVRLGHYSLSPVYESGQQMFQGVKSIPHPGYSHPGHSNDLMLIKLNRRIRPTKDVRPINVSSHCPSAGTKCLVSGWGTTKSPQVHFPKVLQCLNISVLSQKRCEDAYPRQIDDTMFCAGDKAGRDSCQGDSGGPVVCNGSLQGLVSWGDYPCARPNRPGVYTNLCKFTKWIQETIQANS

SEQ ID NO: 1595 - protein, 259 aa, Artificial Sequence
  Synthetic polypeptide
MNNLHRELAPISAAAWAQIEEEVARTFKRSVAGRRVVDVEEPGGVELSGVGTGHLHTIAAPRERVGAKLREVKALVEFTVPFELRRDAIDAVERGARDADWQPAKDAAQRLAFVEDSAIFDGYPAAGIVGIREATSNRKIALPSDVGAYPGAIGDAVEALRLAGVDGPYSVLLGADAYTALAEAREHGYPVLDHIKRIVSGEIVWAPALSGGCVLSTRGGDFALHLGEDVSIGYRSHNDEVVHLYLRETFTFLMLTSEA

SEQ ID NO: 1596 - protein, 44 aa, Artificial Sequence; identical to SEQ ID NO: 1512
  Synthetic polypeptide

SEQ ID NO: 1597 - protein, 51 aa, Artificial Sequence
  Synthetic polypeptide
GLDFSQPFPSGEFAVCESCKLGRGKCRKECLENEKPDGNCRLNFLCCRQRI

SEQ ID NO: 1598 - protein, 22 aa, Artificial Sequence
  Synthetic polypeptide
FIGSALKVLAGVLPSIVSWVKQ

SEQ ID NO: 1599 - protein, 109 aa, Artificial Sequence
  Synthetic polypeptide
MLRVLMMSLLVVAALGHISPPRPEGCNYYCKKPEGPNKGSNYCCGPEYIPLKREEKHAGNCPPPLKECTRFPRPPQVCPHDGHCPYNQKCCFDTCLDIHTCKPAHFYIN

SEQ ID NO: 1600 - protein, 118 aa, Artificial Sequence
  Synthetic polypeptide
MRVCVMVLALVVVTMARSPPFRPLSCPRPKVDIPGCVNTCQAKDKPGFFYCCDSKGLNAGTCPKVHLQPYERNVLCDRTQFNYPNHLNCKDDEDCQVFEKCCYLPDNHQLICRNSEDI

SEQ ID NO: 1601 - protein, 76 aa, Artificial Sequence
  Synthetic polypeptide
MKVLAVSLAFLLIAGLISTSLAQNEEGGEKELVRVRRGGYYCPFFQDKCHRHCRSFGRKAGYCGGFLKKTCICVMK

SEQ ID NO: 1602 - protein, 29 aa, Artificial Sequence
  Synthetic polypeptide
IEGRFKCRRWQWRMKKLGAPSITCVRRAF

SEQ ID NO: 1603 - protein, 26 aa, Artificial Sequence
  Synthetic polypeptide
MFKCRRWQWRMKKLGAPSITCVRRAF

SEQ ID NO: 1604 - protein, 43 aa, Artificial Sequence
  Synthetic polypeptide
GKIPVKAIKKAGTAIGKGLRAINIASTAHDVYSFFKPKHKKKH

SEQ ID NO: 1605 - protein, 29 aa, Artificial Sequence
  Synthetic polypeptide
MKVFFLFAVLFCLVRRNSVHISHQEARGP

SEQ ID NO: 1606 - protein, 59 aa, Artificial Sequence
  Synthetic polypeptide
PHQTGQLTDLRAQDTAGAEAGLQPTLQLRRLRRRDTHFPICIFCCGCCKTPKCGLCCIT

SEQ ID NO: 1607 - protein, 73 aa, Artificial Sequence
  Synthetic polypeptide
MKFFALFSFFVLCVALATAGHLGRPYIGGGGGFNRGGGFHRGGGFHRGGGFHSGGGFHRGGGFHSGGSFGYRG

SEQ ID NO: 1608 - protein, 104 aa, Artificial Sequence
  Synthetic polypeptide
MSTPKWNLSISRAVICVIALFASMICAAAHFVGGIHTNAGYVGWYHPDYYNHDVIGVGNYHPGYGWVAPVYATPTYIIGNTGYNCQTVQQCDSEGNCIQSQNCD

SEQ ID NO: 1609 - protein, 91 aa, Artificial Sequence
  Synthetic polypeptide
SLWLLLLGLVLPSASAQALSYREAVLRAVDRINDGSSEANLYRLLELDPPPKDVEDRGARKPASFRVKETVCPRTSQQPLEQCDFKENGLV

SEQ ID NO: 1610 - protein, 54 aa, Artificial Sequence
  Synthetic polypeptide
AMSLVSCSTAAPAKIPIKAIKTVGKAVGKGLRAINIASTANDVFNFLKPKKRKH

SEQ ID NO: 1611 - protein, 54 aa, Artificial Sequence; identical to SEQ ID NO: 1610
  Synthetic polypeptide

SEQ ID NO: 1612 - protein, 44 aa, Artificial Sequence
  Synthetic polypeptide
MEGLFNAIKDTVTAAINNDGAKLGTSIVSIVENGVGLLGKLFGF

SEQ ID NO: 1613 - protein, 44 aa, Artificial Sequence
  Synthetic polypeptide
MTGLAEAIANTVQAAQQHDSVKLGTSIVDIVANGVGLLGKLFGF

SEQ ID NO: 1614 - protein, 95 aa, Artificial Sequence
  Synthetic polypeptide
MLQGRQFRSCQSYLRQRGNVLEMATGNPQSQTVEECCESLKDIERKQQQCGCEAIKHAMRQMQGGQSEEVYRKARMLPRTCGLRSQQCQFNVIFV

SEQ ID NO: 1615 - protein, 59 aa, Artificial Sequence
  Synthetic polypeptide
PHQTGQLTDLRAQDTAGAEAGLQPTLQLRRLRRRDTHFPICIFCCGCCKTPKCGFCCKT

SEQ ID NO: 1616 - protein, 65 aa, Artificial Sequence
  Synthetic polypeptide
MNFSRALFYVFAVFLVCASVMAAPEPRWKIFKKIEKVGQNIRDGIIKAGPAVAVVGQAATIAHGK

SEQ ID NO: 1617 - protein, 18 aa, Artificial Sequence
  Synthetic polypeptide
PMFKCWRWQWRWKKLGAM

SEQ ID NO: 1618 - protein, 74 aa, Artificial Sequence
  Synthetic polypeptide
MKVLAVSLAFLLIAGLISTSLAENDEGGEKELVRVRRGGYYCPFRQDKCHRHCRSFGRKAGYCGGFLKKTCICV

SEQ ID NO: 1619 - protein, 44 aa, Artificial Sequence; identical to SEQ ID NO: 1613
  Synthetic polypeptide

SEQ ID NO: 1620 - protein, 33 aa, Artificial Sequence
  Synthetic polypeptide
SKWFTPNHAACAAHCILLGNRGGHCVGTVCHCR

SEQ ID NO: 1621 - protein, 18 aa, Artificial Sequence
  Synthetic polypeptide
RRWQWRGIGKFLHSAKKF

SEQ ID NO: 1622 - protein, 76 aa, Artificial Sequence
  Synthetic polypeptide
MDKKAANGGKEKGPLEACWDEWSRCTGWSSAGTGVLWKSCDDQCKKLGKSGGECVLTPSTCPFTRTDKAYQCQCKK

SEQ ID NO: 1623 - protein, 42 aa, Artificial Sequence
  Synthetic polypeptide
AKIPIKAIKTVGKAVGKGLRAINIASTANDVFNFLEPKKRKH

SEQ ID NO: 1624 - protein, 45 aa, Artificial Sequence
  Synthetic polypeptide
MKALLILGLLLFSVAVQGKVFERCELARSLKRFGMDNFRGISLAN

SEQ ID NO: 1625 - protein, 45 aa, Artificial Sequence
  Synthetic polypeptide
MKALLILGLLLFSVAVQGKVFERCELARSLKRFGMDNFRGITLAN

SEQ ID NO: 1626 - protein, 55 aa, Artificial Sequence
  Synthetic polypeptide
GCVWPDGKAITTHKLQTTMQETKALIMGYFKSIATGGAMMAKPQEQLTPVIYPAV

SEQ ID NO: 1627 - protein, 55 aa, Artificial Sequence
  Synthetic polypeptide
GCVWPDGKAITTHKLQTTMLETKALIMGYFKSIATGGAMMAKPQEQLTPVIYPAV

SEQ ID NO: 1628 - protein, 55 aa, Artificial Sequence
  Synthetic polypeptide
GCVWPDGKAITTHKLQTTMLETKALIMGYFKSIATGGAMMATQDGAVTPVIYPAV

SEQ ID NO: 1629 - protein, 45 aa, Artificial Sequence
  Synthetic polypeptide
MRLLWLLVAMVVTVLAAATPTAAWQRPLTRPRPFSRPRPYRPNYG

SEQ ID NO: 1630 - protein, 60 aa, Artificial Sequence
  Synthetic polypeptide
MFTLKKSLLLLFFLGTINLSLCEEERNADEERRDDPEERAVEVEKRILPILSLIGGLLGK

SEQ ID NO: 1631 - protein, 87 aa, Artificial Sequence
  Synthetic polypeptide
NWVKQAPGKGLKWMGWIRTNTGEPTYVDDFKGRFAFSLETSASTAFLQINNLKNEDTATYFCAITTATSDYYAMDYWGQGTSVTVSS

SEQ ID NO: 1632 - protein, 74 aa, Artificial Sequence
  Synthetic polypeptide
MEIKYLLTVFLVLLIVSDHCQAFLFSLIPSAISGLISAFKGKRRRDLNAQIDQFKNFRKRDAELEELLSKLPIY

SEQ ID NO: 1633 - protein, 74 aa, Artificial Sequence
  Synthetic polypeptide
MEIKYLLTVFLVLLIVSDHCQAFLFSLIPSAISGLISAFKGRRKRDLNGQIDHFKNFRKRDAELEELLSKLPIY

SEQ ID NO: 1634 - protein, 44 aa, Artificial Sequence
  Synthetic polypeptide
DKLIGSCVWGAVNYTSDCNGECLLRGYKGGHCGSFANVNCWCET

SEQ ID NO: 1635 - protein, 51 aa, Artificial Sequence
  Synthetic polypeptide
  misc_feature (1)..(1): Xaa can be any naturally occurring amino acid
XTYNGKCYKKDNICKYKAQSGKTAICKCYVKKCPRDGAKCEFDSYKGKCYC

SEQ ID NO: 1636 - protein, 18 aa, Artificial Sequence
  Synthetic polypeptide
RGGRLCYCRGWICFCVGR

SEQ ID NO: 1637 - protein, 18 aa, Artificial Sequence
  Synthetic polypeptide
GLVDVLGKVGGLIKKLLP

SEQ ID NO: 1638 - protein, 56 aa, Artificial Sequence
  Synthetic polypeptide
FSFKRLKGFAKKLWNSKLARKIRTKGLKYVKNFAKDMLSEGEEAPPAAEPPVEAPQ

SEQ ID NO: 1639 - protein, 35 aa, Artificial Sequence
  Synthetic polypeptide
GFGSLFKFLAKKVAKTVAKQAAKQGAKYVANKHME

SEQ ID NO: 1640 - protein, 25 aa, Artificial Sequence
  Synthetic polypeptide
IWLTALKFLGKHAAKHLAKQQLSKL

SEQ ID NO: 1641 - protein, 26 aa, Artificial Sequence
  Synthetic polypeptide
GIGAVLKVLTTGLPALISWIKRKRQQ

SEQ ID NO: 1642 - protein, 22 aa, Artificial Sequence
  Synthetic polypeptide
FFHHIFRGIVHVGKTIHKLVTG

SEQ ID NO: 1643 - protein, 20 aa, Artificial Sequence
  Synthetic polypeptide
KWKLFKKIGIGKFLHWAKKF

SEQ ID NO: 1644 - protein, 13 aa, Artificial Sequence
  Synthetic polypeptide
FFPVIGRILNGIL

SEQ ID NO: 1645 - protein, 19 aa, Artificial Sequence
  Synthetic polypeptide
MASRHMFLPLIGRVLSGIL

SEQ ID NO: 1646 - protein, 25 aa, Artificial Sequence
  Synthetic polypeptide
FKCRRWQWRMKKLGAPSITCVRRAF

SEQ ID NO: 1647 - protein, 34 aa, Artificial Sequence
  Synthetic polypeptide
ALWKTMLKKLGTMALHAGKAALGAAADTISQGTQ

SEQ ID NO: 1648 - DNA, 105 bp, Artificial Sequence
  Synthetic polynucleotide
gctagcatggacttcaaggactggatgaagaccgccggcgagtggctgaagaagaagggccccggcatcctgaaggccgccatggccgccgccacctgacctagg

SEQ ID NO: 1649 - DNA, 96 bp, Artificial Sequence
  Synthetic polynucleotide
gctagcatgggcatctggggcaccctggccaagatcggcatcaaggccgtgccccgcgtgatcagcatgctgaagaagaagaagcagtgacctagg

SEQ ID NO: 1650 - DNA, 78 bp, Artificial Sequence
  Synthetic polynucleotide
gctagcatgttcatcggcaccgccctgggcatcgccagcgccatccccgccatcgtgaagctgttcaagtgacctagg

SEQ ID NO: 1651 - DNA, 72 bp, Artificial Sequence
  Synthetic polynucleotide
gctagcatgggcctggtggacgtgctgggcaaggtgggcggcctgatcaagaagctgctgccctgacctagg

1. A method for inhibiting the growth or reducing the growth rate of one or more rotifers, comprising contacting the one or more rotifers with an isolated antimicrobial peptide (AMP), wherein the growth or growth rate of the one or more rotifers is inhibited by the AMP compared to the growth of the one or more rotifers absent the AMP.

2. The method of claim 1, wherein the AMP is from about 5 to about 200 amino acids in length.

3. The method of claim 1, wherein the AMP is an insecticidal AMP.

4. The method of claim 1, wherein the AMP is a non-insecticidal AMP.

5. The method of claim 1, wherein the concentration of the AMP is about 0.5 μM to about 500 μM.

6. The method of claim 1, wherein the concentration of the AMP is about 75 μM to about 370 μM.

7. The method of claim 1, wherein the AMP comprises the amino acid sequence of any one of SEQ ID NOs: 1-1647.

8. The method of claim 1, wherein the AMP comprises the amino acid sequence of any one of SEQ ID NOs: 32, 36, 62, 64, 122, 232, 235, 246, 803 and 1637.

9. A method for inhibiting or preventing a rotifer infestation of an algae culture, comprising contacting an algae culture with an isolated antimicrobial peptide (AMP), wherein the concentration of the AMP in the algae culture is sufficient to inhibit the growth of and/or reduce the rate of growth of a rotifer in the algae culture.

10. The method of claim 9, wherein the AMP does not substantially inhibit the growth of the algae.

11. The method of claim 9, wherein the AMP is from about 5 to about 200 amino acids in length.

12. The method of claim 9, wherein the AMP is an insecticidal AMP.

13. The method of claim 9, wherein the AMP is a non-insecticidal AMP.

14. The method of claim 9, wherein the concentration of the AMP in the algae culture is about 0.5 μM to about 500 μM.

15. The method of claim 9, wherein the concentration of the AMP in the algae culture is about 75 μM to about 370 μM.

16. The method of claim 9, wherein the AMP comprises the amino acid sequence of any one of SEQ ID NOs: 1-1647.

17. The method of claim 9, wherein the AMP comprises the amino acid sequence of any one of SEQ ID NOs: 32, 36, 62, 64, 122, 232, 235, 246, 803 and 1637.

18. A transgenic algae comprising an expression vector, wherein the expression vector comprises a heterologous promoter operatively linked to a nucleotide sequence encoding an antimicrobial peptide (AMP).

19. The transgenic algae of claim 18, wherein the nucleotide sequence encoding the AMP is codon-optimized for expression in algae.

20. The transgenic algae of claim 18, wherein the AMP does not substantially inhibit the growth of the algae.

21. The transgenic algae of claim 18, wherein the AMP is from about 5 to about 200 amino acids in length.

22. The transgenic algae of claim 18, wherein the AMP is an insecticidal AMP.

23. The transgenic algae of claim 18, wherein the AMP is a non-insecticidal AMP.

24. The transgenic algae of claim 18, wherein the AMP comprises the amino acid sequence of any one of SEQ ID NOs: 1-1647.

25. The transgenic algae of claim 18, wherein the AMP comprises the amino acid sequence of any one of SEQ ID NOs: 32, 36, 62, 64, 122, 144, 232, 234, 235, 240, 241, 243-246, 248, 802, 803 and 1638-1647.

26. The transgenic algae of claim 18, wherein the AMP comprises the amino acid sequence of any one of SEQ ID NOs: 32, 36, 62, 64, 122, 232, 235, 246, 803 and 1637.

27. The transgenic algae of claim 19, wherein the nucleotide sequence encoding the AMP comprises any one of SEQ ID NOs: 1648-1651.

28. An expression vector comprising a promoter operatively linked to a nucleotide sequence encoding an antimicrobial peptide (AMP), wherein the nucleotide sequence is codon-optimized for expression in algae.

29. The expression vector of claim 28, wherein the nucleotide sequence encoding the AMP comprises any one of SEQ ID NOs: 1648-1651.
